United States Patent Application Publication US 2026/0258423 A1 - sequence listing, part 17

SEQ ID NO: 167803 - DNA, 46709983 bp, Homo sapiens (residues 16,682,141-18,350,354 of 46,709,983)
  source 1..46709983: mol_type = genomic DNA
tatttcagttaccttatgggttagacaaaatccacagtgtattagtccattctcaccctgctataaataaatacccgagactgggtaatttataaagaaaaagactttaattgactcccatttccacatggctggggaggcctcaggaaacttacagtcatggcagaaggcaaaagagaagcaaggaccttggttacattgcagcaggagagagaagtgcaagcacaggaaatgccagactcttataaatccatcagatctcatgagaattcactatcacaagaagagcgtgggggaaaccaccccatgatccaatcacctccctccctctacacgtggggattacaagttcctcccttgacacgggaggattataatttgagatgagttttgggcggggacatagagacaaacaatattacacagtatattggcttttataatcaagtgaaagtttagggctaattaaataatggtctaggtaaatggatattgtttagataactggaaacagggtcttaattttatatatatatatatatatatatatttttttttttctttcttttcagttagtataacagaaaatgctggagcatggatcaaaaggcagagcaaccataaggaccccgtaatgggacataattaatgaggcaaaagtataaacttctaataaaattacaaactcaaatagattggcattgtttttgcattaaagtattatacttatcttggctgtgctttatatcctaatttgtagttttctattttatttaattcattattttaaaaaagtttccaatgttagaaaatttctgtaggaaactttaagtctgccggccacgcaaaaacatttttatagtttctttcatcaacattaattaaatggctacagatgccctgttaattttcttatgaattgcacacttattataccattttataggcatcttatcagtcatgagtacacattgaaaggtttgcattagttttgctaacaaagtatttatcctaaaatgcagatggtagaattatagatatgattcttaaggaaaataccgtgcttgaaaaatgaagtatcaaatacaacacactctctctctccctctgtctctctctctctctctccacccacatttaaaaaacatatacattagggaaaaaattcctgttgatactggagaatgagaacatatccctttatactgaatcattttgaatgtagaaaataggatatgtttctgaacagaaaaaatactttaagcattaattagcatgtataaattaatttataagaaaaaactcatccagtgtttacacaacacttcaataagctgcactaacggaaccatacaaaccctttgcacaagtgtagaaaaatacttaatggttttcatttgacttctctctgaatatattatcaagtcttaaaaataacactgtaccttttggtgagaaacatacaatagtcctgaaatagacattcattttctacatttcacttttaagcaattaacagtttatattagttgtcaagagtttgtgttttaaaaaaaattctaagtagaataaacatttataggtgacttttaaacactggaaaacatttatttgagaatcgatcatgttttttaaaagtgctgtatctgacaaaaaaaagtgtctttttccttttctatctcatttttatataagagaaatagagttgttccaaggatcatcttaattgtcatacctgcattaaaaataactttatttggattacagtttttatcatctgcttttttaaaacggaataacattgaccttgaaactttcacttttacaatgagaatgacagttttcttctgggagatattcacatgtaattattagttgttctttgctttgaatttattaaagtacattcaaggaagtctatttcaagactcaattttttatattacatttttaaaattcaatgtagaaaacatcaaaaatgtgaaaattatactgatgtctttctgacccaacaaaacacaaaatgctattcagtacttctcagccttggctatttactggaagcacctggggacggaggtgaagctcacgaaggtcctgatgccctggctgccccttggatcatttatatcaaattgaagtgtgggaactggcagcgatatttttaagaattacctgaagtttccaatgtgcagacaaacttgagaaatactactcaactagtggctctgaatttgttttacattctaattacctgtggaggtttttaaactttgtttaaaagtcaaaaccacactccataccaattaaatcaggtagagtgagacacaaggaacagcgtttaaaaatgtttcagctgattacagtgttcagctaagtttgagaacaagtgctttaggttggaaatcagtttaggcatattgctgttctatgtttgtggattgtttcagtttgtgatagggaggtggtggggaagatgacaagaagggaacaaatactactgcattttttaaccaacgctattttgtagattctacgtatttaaagccatttaataaaaacttagcctatattaaatgtgaagcacattaacgaaagagttgcatgaaaatataaaactgtttaatgaagatctggtagctttccctcagaattgcaaaggagaatgtaaactgttgtatcgtgattcctttatctcttccacagagaaaatacaccataaaagtaataagaacatgctaaagcaactgttagttaaatatgtatttccttttcttacaaattgtgccctttgttgaaaaattgcaaagtgatagatggcttatttgtttatattgttaggttgtataagatgtactcttttcaaaaactgttctaacaatttggtctgaattgagcttggattcttccaaattttattgccatatacattaagtttcaatccaagctttaatacttactgttatgcctttttcaaaaagcattccaaagaaaagttacagtcaggtcaatttgctaaaatatgctagaataaaaagccaatataatcatgaacttttgctccataatcattatgtttatccctgtatatgtccaaataatatttgaggtagttcacagtcaactgggataaaggagggagagatgcccaatattgtctttgtgttattctttctgtagcaagtaaactgtcaattcattacagtgtagagatacataaatgctaaaatatggaatacattaaatgttgaataagtttttattatctagtgataaggtctgtgaaaattatatattgaaacttgaaacaaaagcaagagttttactaaatagttattcttgttcttaaatttccatttctacatgtgacatcaaaatcgcaatccagtcttcaaagggatgttataattatgtaggtacagatacagaactcctacatctcccactcacatacccacacacacccacctaaacatttcttaacaataatttctctacaggcttttaaaattatgaaggtaattatatttccacctcctgattttcaccatattgcagtgatcaaacattgtacaaacaggattaaagcatttatgttttgatcaagatcatttccctgctggagctatcatttgcgtcaagggcaaatgtatgaacacagtttgaaaatcatgcaagaagctagaatccgtggaagagtagttaaccaagattctacatcatcagccaggaacaacgtgtgttcatgactctttgtggtgatttattcacatactgcccggttacattggattagtttttctaaagataagtttctacaccagatgactttctaaagccttgttgagtatgcaactcaatgagttaggagtttcctttgttagcaaacctgtcttttcttgacaatgaaaactctcactgtgagtgttaaacctagtcttgtctgctgtgaagctgtagttgaaatcttgtctcacctgtgaggcatactggatataaattagtgaaacacaatgcttgaggaacagtagtagtactttgagctaatggattaaccaactctaagtttaacttctctgctccctagtttttgaaaacagaatagtcatcaaagatggagctgtatatacggctcctgaatatagatgtaaggaattcatagcccaattcaatctaattatgtgggaaatgtcttatttgtagaaagaacatgagttttgtttgagattacccgacagctccattactgactagctctctgacaaggggcaaataatgtgacttcttaaagccttagtttattcatcataaaatgaaaataataaaactaccaaagggtttgtagaggcaattaaatagaataaagcttgtaatacacctaacagggcaaattacacatagcagtcaccaaaataatatccattttccttctgtgtaactgtgaggaaagaagtctgggtcccaagagtaggctgacatgacaagtgacaagataaataatattatcataataaaaaactataaaaagtattgtttttcaacttttccctctaattacattacctctccttccatgacccctttgtttttctcactcatttagaagattgtacttccttttattcagcctaaccattctgcatacacagatacatcatactttggacatcatgcttgaaaatatttttaagcaaatgtatgaatattagaccaagatacacacttataattgtatatgaattatttgacctcttaaaatgtatttttacaccaagcggtaacaacaaatgtgataaatcaagaaaattaagagccaccgcacattactggcttgtcaaaaagcacatatattcatgcttctgatgtggttatataaacacatcactgcactgtttccaagcagaaatttgtgtggcttggcagtcctagaaggattgaaaaagttaaaaaggattatcacagtatccattatgaagctctattggagatgttttgacataactactattttacttatttgattaacaaaaactaacactgatttttttttaaattttgactcaagaatattattagattagtcttgcttttactgtaggtatttgcagaaactcattcaactttctagaaacttttgcctagaataactcaaaaatggctgctttaaaagaaaatttgctgaaaatttgttcagcattatcacctacaaaaatggttttgtaagccgggcgcggtaacacacacctgtaatcccagaagtttgggaggccaagattggcagatctctcaaattcaggagtttgagaccagcctgggcaacatggcaaaaacctgtctctagtaaaagtacaaaaattagctgggtgtgatggcgcagggctgtaatcccagtacttagatggctgaggcacgagaatcccttgaatcctggaagcagaggttgcagtgagccacaatcatgccactgtactccagcctgggtgacagagtaagactctgtctcaaagaaagaaagaaagaaaaaaaaggttttgtgataccatgttctacataccagttatgatggtgatgtctcaattcagatatgttcatttcgttaactttcatttaatttttttatttttattttttattattattttttgagaccgagactcgctctgtcacccaggctggagtgcagtggcgccatctccgctcactgcaacctccgcctcccaggttcacgccattctcctgcctcagcctcctgagtagctgggactacaggcgcccgccaccacgcccggctaattttttgtatttttagtagagacggggtttcaccgtgtcagccagggtggtctcaatctcctgacctcgtgatccacccgcctcggcctcccaaagtgctgggattacaggcgtgagccatcgcgcgaaaattagcctgtaaatggtcatttcaaaatgcttctatctgatcatggaaaaaaattatacaaatcccagttaaaggacattctataaaatatctgactgatacatctcaaaactatgaaagtcgtcaaaaacaagaaaaatttgagaactctcacggttgaagcaacatgactgctcaatataatatgctatactggatgagatcttggaacagaaaaagattaggcaaacaacagaataaaatatggattatagttaataatgtgtcaatattgtttaattgataataatagatgtaccatactaatatcttagtaaaaagaaatctggatgtggggtatatgagaactctctatattatcttcagttttaaaattaattctaaaactattctaaattaaaattttaatttaaaaaatgctccctttttgaaattcatgttgggtatttggtgtcaatttgaaatcccataatagtgctcaaattcaaagcaacaagcgacttttaatcattcagcattgaaaatttccttgcccttaaaatttgctatcttgtgcagataacatatataagcaagaaatatttgacgaaatgacacaagaacaatatacaattaagggataaaatgaagagataagacaaagaagaactcttggcattgagaagtaaatgtgcaaaacagttaactgtctcagaaaaatcagggatgtagaacagtgttgttcaatagaactttctgtgatgatggaaatgattgcatgtgctgtataatatgtagccacagctacctgtagctatagagaacttgaaatatggctagtgtgactggggaaatgaatgttttatcttctccagtttaaattgaattggatttaaatagcgacatatgactagcgcctactgtattagtgtgaaattagtgtttgagctaaacacagaagcccaagtaaaacttcggtagatagcccatttcagtgcaaggacacactatagttaataaaagacaccatgcttgtggaacagtgagtagatccatgagctactacatcaatcaaccttcaaatctatcccacctctgtacttcctgttctttgatccaaaactcattttctatgtaagccaattttagctcttcatatgagctatgcatccaaatttaatcttctctttaaggttttttgttctagtttaaacttggtctttagaagagaaaattgagagaagcaaaatcataaaagagaaagaaaaggtatatctgatccatgagggagaacttgcttttttatgtctctgatgttctaatctgattttatgccgtactaaattgtgatgagtcccatttagcttaaccttatttttatactcgtgcgttgccagccatagtttttcgattagttagctggagttcttataaaaaggatatcacggccaggcacagtggctcacgcctgtaatcctagcactttgggaggccgaggagggcggatcacgaggtcaggagatcgagaccattctggctaacacggtgaaaccccgtctctactaaaatacaaaaaaattagctgggcttggtggcagacgcctgtagtcccagctactcgggaggctgaggctggaggatggcgtgaacccgggaggccgagcttgcagtgagccgagatcgtgccactgcactccagcctgggcgacagagcgagactccgtctcaaaaaaaaaaaaaaaaaaaaaaagggatatcactttcatctctccttacaactcttatctacttccattgtataaagcttgaagagatgagttggatatgagataaagcttcttcaacaggtgcaggcactcaacaatcttagctataagtgagagaaagatgcatcaggtaggtgagaattacttctaccatgtagttttccatcaaccactctaaaattgcctagaagcctgagcctaagaagaagattataagtattgattattcatcttcccataaaaaaccattaagaataattccattacatgtttatatcattgaccaccaaaagttcaatcctcaaaggtcatccatcatcatctgagcacttacacctaaagtctctatgtacctctccactaatgtgaccctctatcccaaccctccccagtgctgcagacatttccattaaagctcctaggaatgtactgtcatcaacaaaactgcctgtacactcacaatcttttatgagcgttagcttcactttcttgctttaattgaagtctagtgatttctgaggtcacttatctccttgaagatctctcaaacagagaatagatttactctattctctgagaaaccttcaggtggtatcatccttgtttctcattgctggtcaatgggttggcagatctatgcacttccagaatgcttatcaatccttgtctctcaatcaagccagctactttgaagcacatgccatcagattacaccaactcttacccttccttgtttattttccaaattcccagtcactttcactcattgaaaattttagtgactggttcatgtgcttctcttcaaaactacttcagttattagtctctgaaataataaattctaaatagaaaattaatctattaataacatctaggctcagtcactttcagtaacatatttttctaaaatccccttcagtcacactattttgtaatcataccctaaaacttggcattaactgtaacaatatttgcagtttagccatctctctgaacagagattcttattattccaggtttctagtatcccatcccaaaaattttatgaggccatcagagctgccaatccattggtcattctgtcattttttcaccacgcattaatcacctaatatcattattatcctctttacctaatttaagtcaatgttcaatcactatgattactctctcgtctttactcacaactcccttacctatagttactccatcatacttcttggaaaaatcctaaacaaggttaaaccctatgttctgctgtaataaacctttacttaggaagtgttgaaaaacatacaactgtgctgattgggctcccttttaattcatatgttacaacgctaaggttgttcctttttagagcctgtaaatcatgttactcttacttttctcatctctcaagtgattctttcaaatctttacgtatgttctgttgtgaaataccaaacacttgcttttattccaactgctaacttcaatttctatttgcttgaagacagaagcaattaggagagaatccctttattgctttcccactatatttagcaaactcttggtatgtaggcacactgtcttctgtgtcatgcaagaacaagagactaaaatgctaatgcctattcttctgcttctgcacctgacctcacctcttctttcctatacaaggactttgctcttaatcattattcctctttcctaaattatctattttttctctactgtatctttatgatcagttcaaaaattacatatatgcataatatgagcaactcccacatggtagcctctttcactcattgtggtattcattcaagaatcccctccacagagaggcctcccctgactaccctatctaaatacagtgtctaaacatatcattttctcttgctctaggctgttttattttttcttcatagctctagtgattactggaaggtaaacttacaacattggtggtttagatggttgactctgtttttaaagtcagggatcaaaactgttgcacattggcacctccattgtctcattcaattcctggatcacagtagattttgattattaaaaaaagcaaaagttcaaattaattgactagtcttaggcttaaaaccatggacttaatataatgttacattgcatgatactattgttagtgtcctgaggaaatggcagcccacaaaagaacaccatgaatgacaggtaaaggtcctcggtgctacagttaagatggaagttggtggaatttgacagaaagggagtgaagccctcttttccccatgtgagtttaagtcaagtgagagaaagtaaagagatgggcaaatgaagcacaaacattatttttattaaactagatagtttatatgaatagccacaatgggtttccaaatacagaagctcagaattatccagactttccatttgtactcagagtgagtaaacaaagattccgccctgtaaataaaagggaaaagaaatgtaagtttcctacaggcaataactccatgatcagttcttactaaaaattctccaactggaattcaattctcctactcctggaggatgccagtgaattagtaaagaaagatcatgagttttacactaatgaatatcactctacatgaaaacacaaagaatggagcataaggactccttaagaataagacccaaaccgtgaaagacaaaataatattcttagtttgtatacctagagaacaaacagagcctcaactaaactttctactgcaaactgattagtatatgaaaatattttaatatcggtgagaaaaaaagaagtgagaaattatcaacggacttttttgatattaaataatctggatatattgtctttggaagaacttatgtgccagttatttattgtcacaacaatactgcagtgataacaccatagaacaaacaaccacaaaagtgtatgtataattaacaataattagtcattgtgcatgtgtctgtaatcaagtgggggtcagttaaggggatcccctgacattgtttatgcttgcttagatacctggagctcagagggctgttgagggaggtaggctggcttctgccagagtgaccagggcaactggacaactgtaatgtgacacaggcccagtgacccaggctaactgcggagacacaagaaagaatacattgaaatatgtcagaccccttaaggtctaggttcatactaggcaccttctcttaaaaatcaccctatagatcaaagcaatgtgtatgtccaagtttaggatgaagaggtgagtgaatatgccccatctcttttttggaaaggattgcaggatcacatgacaaagggtacaaatatagttagggaggaagaattaggaccattaatgcagtctatcacagtgtaacattgaggcagtgactagattttaaaatttagttactgacagaagaaagatggcatacatagccacattacaattgagttttcctcatttctaatatttgcaacatatccaatatatatcagtatcaatatattcaatatattataccattatcatcttctgcataattattgttatgtaaacaattcatcttggtgtgagatacattgtttagaaacaaactgctcttttaggttgtaaagaatttgtcacctcataactactcacgaaaagatgtagaaccacttgttagtacaacgagaactcaaaagtcatgatgattcctagtagggaggtaatcctactcaggggcagcttatgcagaagaatataaaccaaacccagtatgtcaggaaaatacctataagtgcaaatgagaggcttacaattgattgagtcacaggataaagtggaataacaaacactgtttgttcaggttggcagtcccaggtaataatttagtagctcaactacaagagacatgagtctggctcacaggactcagattcacatgtgggaatccagagacccagactgtctatggtaaggaaatactgaagatcttaaacagcaagcactggtgtctctgctactcccagaccctaacttataaattattaattccttcaccttcggctttcctgcttttctaaatagtcttcacatgaaatctgtagttagattttacttagtgctatagaaaaagatatttaccaagcaaatgctaacatgagaagattttgagtgctaaaattaggagtgcactcattgtattaatctgttttcacactgctatgagaactacctgagactgagaatgggtattttataaagaaaagagttttaattaaatcacagttccacaaggctggggagggctcaggaaacttacaatcatagaggaaggcaaaggggaagcaaggcatgtcttatatggagacaggagagagagcgagggaggaagtgccagacttctaaaccatcagatcgcatgagaaaggactcagtatcaggagaacagcaagggggaagtccacccccattattcagtcacttcccaccatgtccctcccctgacatgtggagattacaattcaagatgagatttgggtggggacacagagtcaaaccatatcattccagccctgacccctcacaaatctcatattcttctcacattttaaaataaatcatgccttctcgacagtgccccaaagtcttaattctttccagcattaactggaaagtccaagtcgaaagtttcatctgagacaaatcaagtccattccacctaggagcctataaaataaaaaaacaagttagttacttccaagatacaatgaggatacaggcattgtgtaaaatgctcccattgcagaagggagaagttggccaaaacaaaggggctacaggccccacacaagtctgaaacccagcagggcagtcattaaatcttaagtctccaaaataatctcccttaacttcacttctcacatccagggcacattaatgcaagggatgggctcccaaagccttgggcagttccatccctgtgcctcttcaggagacagcccccgaggctgctttcaccaactggcgttgattgcctgtggcttttccaggtgcacagctgttggtagatttaccattctggggtttggaggacagtggcctctttctcacagctccagtatgcagtgccccagtggggattatgtgttggggctccaatcccacatttcccctctacactgccctagtggagggtctccatgagggctccacttctgcagcagaattctgtctggacatctaggtgtttccattcatccactgaaatctaggcagaggttcccgaacctcagttcttgtcttctgcacacttgcaagaacaacaccatgtggaagctgccaaggcttggagcttttaccctctgaagcaatggcctgagctgtaccttggcctcttttagccatggttggagctggagcagctgggacacagggtgccatgtcctgaggctgcacagaacagcagggccctgggccgtgcacatgaaaccattttttcatcctaggcctcaaggcctatgatgggaggaacagccatgaaaatctctgaaatgccctggagacattttcccattatcttggtgattaacattttgcttctctttaattatgtaaagttttgcagccagtggcttgaattcctccccagaaaacctggattttcttttctactgcatgatcaggctgcaaattttccaaacttttatactctgcttctcttttaaacataagttccaatttctgataatctctttgtaaatacatatgactgtatgatgttaggagcagccaggccacatcttgaatgcctggatgtttagaaatttcttccaccagataccctaattcagttctctcaagttcaaagctccacagatctccaggacaggggcaaaatgccaccagtctctttgctaaagcacagcaacagtgacatttactccagttcccaataagttcctcatctccatctgagaccaccccagcctggacttcattgtccatgtcactatcagcattttggtcaaaagcattcaacaagtctctaggaagttccaaactttcccacatcttcctgtcttctgctgagcccatcaaattgtttcgacctctgcctgttacccagttccaaagtcgcttccacatttttaggttcctttatcacacctggtaccaattgtctgtattagttggttttcccactgttataaagaactacctgagactgggtaatttataaagaaaagagatttaaatgactcacagtacagtatggctgaggaggcattgggaaacttacaattatggtggaaggcaaaggagaagcaagacatgtttttcatggtggcaggagagagagagtgaagagggaaagtgtcacacttttaaaccatcagatcttgtgagaactccctcactatcatgacaacagcaagcaggaagtccatctccatgattcaatcacctcccacaatgctcctcctccaacacatgaggattacaattcaaaatgagatttgggagaggacagagtgccaaacgatatcactcgttatgaatgaggtaagagtatagcaaagaagataaagagtcaatgaaaagtgctctagaaaagaaagagaaaaaaggagtgaagacttaaaagagggaagatgaataggtagaagaatcaaattaaactaggacatgaagagttttcttcatatgtataaaaataggatgatcgattggtcttttattgcttacatttttcttgttgaccatgatagggaagaaaaataatggcagaggttttaggcaagtgtgtatcaaggaaatatagatcagcttttgttccaagaagtatggactttacaaaactcacactgtatatactcattgggttagtaagtttaattccagtggatgtgttatatatcaatgagtgtgtagagtaagtatataatgataatgtattatgcctatgaatatgtgttatgggtattcattgcagtgttttatgacatcaatggattaaactaccacttgcttgctttctccaaatgaaagccagctaaaactgtcaaaaggcacatccaggtcagttgaatagatcagtgataagaactgacaaaaagtgcagctttttcattctgcaagcaatatttactctaaaaacctatctaaataatttggctggctgggaacggtggcttatgcctgtaatcccaacattttgggaggccgaggcaggtggatcacctgaggtcaagtgctcgagaccagcctggccaacatggtgaaaccccatctctaccaaaaatacaaaaattagccaggcatggtggtgggcacctgtaatcccagctactcaggaggatgaggcaggagaattgctcgaaccctggaggcagaggctgcagtgagccaagatcatgccactgcactccagcctgggtgagagaccaagactccatttcaaagataacaataacaataataataataattattattatttaactgctgactctatcataagtagaaagaaaaactaaatttgtacttttaaagccagagaatgtaactgaaattcttaagcactctctgtccagtctacaccattcaattccctttcatcttagaagaaaattactgtggtcaaaagtcattgctttaaattcctatatatatgttttaagacacagaatgctaaattcaaaagctgttatcaagtttctgataagggttttgtgataggaagtctaattttgtatggttatagttattaatgagcattgtggtgatttaggctctcactcctacacatggattgctgatccagtagaaatgtgctacaactaagttctctggggttgtacctgaatcctttctccatggcattattttggcttagtctgtctcaggaagttatactgatatgttgcttcccaagagtgtcaatgtgctttctctttcatgtgtttgcttggaaatacagcctgttgagagaaacaactgtcagcttctacttaaacatattttacctaaaatctacaaagcatccatccctttgaagattgttacaggtttatgtgtcaatttaatatgccatattctcctggaaaggctggtactatttcaaagtaatcccatatttacaaaatacaagtagaagttgacaagaacttaaacataaccaattttctctttcgtaaatgcgtagatcaattgtgatgataaatgtattctgacattatttaatccgaatttatttttgcctttcaggcattcttgagaattcatatgcagattttgcattttgtagcttttataaaataaatgttctataccaggttgatttggatgagcatataagggaagcagaaatttttcagtagatgaatgtgtattcataatgaaaatgggcattctaatctttgatgggttgtccaaggaaatgtcttatatttgcaattcttcgaagccaactccatggttctgtggaatatgagacatatattgttttgtcttatatttatttgtttcacagattatattgagtaaatgacatgtgtcaaatatttgttaatcaatagaattgaggtctttttattcccaaggtctttcacagagccctatcatagaggatgtttaaaatgcttgtggttgtattgtctccccttctgtaatgtttagttgctctatgcttattattgttacattttatggaaaattacgtttttggaaaaatcacgctaaaaaaatctatgctacattataaagccaaatagaaattttctcatgacttgaagctattgtggaatgttactgccactgtactttttcatgagactaaattattgagaagcagtaaattgcctcaacagcctgagatttttcctcctatgattgcctgatcacacattttaaatttaggtctgtttgtttctgcaggagtaaatctactcaggtagtcctagtgagatttgttaagtattagaaaatctatcctgctcccacatcatcatagcaataccacagcagttaaaatgagtgtcattaaaattcctctctttgaggttaaaactttcacctaaaaatgtcagttttgaaatgagagtacccccaaaagtaaatttcttttcttatccttaacacagttataatttgtcaagtagatgaaaaagaagagaacatagatcaagcagaaaaatttaaataatcagttttatcgaagaatgtcttacataaagttatttcactcactttattaaattgaataaattttgtaaaaggtattactgtgtttctgccacagtcaagaaacagaaaccctttttacacccaaaaaggatatctcatggtccctgatattgaaatgcatatttccatccccggttcatgggagcagtgctctttgtacctatagtttggtctttcatagaatttcttatcaattggatcacacagaatgtggcttttttcgctcaacataatatccatccattatgttaagagtattggtagtttatttaaccatttatattttgatgaaacattagtattgtgtccaggtttgggattttacaaatacagctgctatgcaacttctcgtatgagcctttgtatgttcatatgttttaatttttcctgacaaatacccagaattgggattgctgagccatatggaaagtgtatgtttagctttgtaagaaactgtcaaactgttttccaacatgattgtacagtattacatttctactagcaatctatgagaatttcaattgctctacctcctcacccacatgtagtattggaagcctttaatttcttctattctggtgggtagataataatgtctaattgtggtttcatttacatttccctggtgactaaacacgttgattatcttcgcatttgttttttggccattcacatactattgttagtgaactgtctgcccatatcttttgcccatttttaaattgagtcattagtcttattattcagttatgagagttctttatatactctccatacaagtctttaatcagatataagatttataaatattttctcccagttgtgacttgccttttcattttctcagcagagacttcagcagagcaacagttttctttttttattttcttttttggatgaagttcaatttataaaattttcctttatgttttgttcttttggtattctagcgaagaagtcattattcaccccagggccagaaagagtttttcctatgttttcttttagaagtagtataattttagctctttcttgtgtttagttgtgaggtaaaggtcaagttctctgtatggatgtatgtatatatgtatactactttgtatattgatgtccatttcctcatgtaccacttgttgaaaatattacctttattttattattgaatatcatcatatttggatgagtccacgtactgtttattgtgtttcactgattatgtttatcttcacatcaatattttgatgacaatctcaattactacataacttgaaattagatactataaattatctaatttagtttctcttttgttaaattgttttgatattttagttctttgcatttctacttaattttagaaccagtgtatcaattacaacaacaaagctttgtggaaatttgactgcaatgagtccacagatgaatttaaagaaaatcgacatcttaaaaaccttgatttttctgatccatgcatatagtatattcctccattttggagtcttctttaatttcccttaggaatattttagttttcagtggatgtcttatacatattttataaaatatatccctaggcattttgtagtttgatgctataattaatgacattatttaattaatttcaatgtcttcttatttatttttagtgtatatcattacaattgacttttgcgtaatgaccttacatcatacaactttttgaacttactttttggctatgaaaagtctgctgtaattattatcttcttttctttgcatgtgttgtgtcttttctccagcttctcgtcatttttaattattgatttctagtaaattgattataatgtatcatggtgtggttttgcttatatttgttcaacttagtatctctttttaaatgtgactatttaaaatgtttttgaaatatttttatttttatttcttcaactatctgccccgtacctctaggactccaatttcacttatatatgtataatgtgatatgtcttataggtttctgatgaactacacttttcattttttttctcttactgtgctttattttgaatagtttctatttgtaagccttccaatccattggtgtttcattcggtagtgtctaatcttcaattagttgcctccagtgtattttttattttgaatattatatttttctctttctctaaaatttctcaagtttttacttttctactatccatttctcatttcatgcttttcttaacttcctcaagtgtatttataatgtttagaccgcattttcatcttaccattccaatatttttgttattttgagtttgtttctattgatatttcattctcctgatgatatgtcatataatcccgctctttggtatccctgataattcttcattagataaaatactttgtaaaatgtgaggtcttcaatggtgattttttttttcttttaatagtttttaactttttttctggcatgtagttaagttacctagaacaagttcaatcctttcaaggatttttgtttttgtttttgtttttgtttttttgagaaggagtctcactctgttgcccaggctggagagaagtggtgccatcttggctcactgcaagctccgcctcccgggttcacgccattctcctacctcagcctcccgagtagctgggactacaggcgcccgccaccacgcccgactaatttttttgtatttttagtagagacggggtttcaccgtgttggccaggatggattcgatctcctgacctcctgatccgcctgcctcagcctcccaaagtgctgggattacaggcgtgagccaccacaccccgctgaccccaactttttcattgaagtttcaaaacagccttctaaagccattgcacaggcatgtatcttctgaggactctacccatcactgcacgtgtgaaaacatttaacaaatctgactgttgggaacacaaattcttctcagccttaggtgatatccagataattttcaaaatattattttctagttttttttccatggctttgtaaaatattactccatgcattcaagatttccagtaaatcaaagacccaagaagactcaactataaacgtctcaaattctctctctgagtgtgtaaaacttccgccatttaaatattctgccgcacagaatttagacaaatttttcactgagctctaatctttgtctctccaacttagctagattgttaggcccagtttgaattttcccttggtccactgtgatctgcaaactgccctcggtgtataaacggtacattttaagattcacctaattatttcacctaatttttctaatctcagagatcacagttctgtactgtgctattgtcctatgtatgaagtcagttgttttacatattttgttcaattttataaatttttttggcataaaggcaattttcagagcagttcctctttcatagatgatagtggaatttcagatcagttttgatgaaagtgagagatgaaacatttagaagaaatgaaagtgggagataaaacatttagaagaaaaagcatggtactaaggggtaatgccgagtagagaattgaagcagggaattttggaaaaccacaggatagcaatgaagggcagttatgaatgaaagcaaaaagacaagttttacttactgccctatattttaaatgtaagaatactctattttagccatgtttatttccatggaaaattctatgaaggattcagcaaagttccataaggaatcatcatcctaaagtgactttttacaacttctgaactgctgtgggacagagtctgggtttggcctttaaaaaatctcagattgggtaaatttttttctccatccaattactcctttttcagctatgtgtttacccagtttggcacctctgtcctttctgtcccttgctccttgcattaaagatgtaaaatacccttccaaggttctattaccacatttaaacctatttcttctctaagaagaaatcattatctacccactagaagagaagaaattaaaggcttccaatactacgtgtgggtgaggagatagaacaattgaaattctcatagattgctagtagaaatgtaatactgtacaatcatgttggaaaacagtttgacagtttcttacaaagctaaacatacactttccatatggctcagcaatcccaattctgggtatttgtcaggaaaaattaaaacatatgaacatacaaacgctcatacaagaagttgcatagcagctgtatttgtaataccaaaacctggacacaatactattgtttcatcaaaatataaatggttaaataaactaccaatactcttaacataatggatggatattatgttgagtgaaaaaagccacttttttaaaattatactttaagttctagggaacatgtcacaatgtgcaggtttgttacatatgtatacatgggccatgttggtgtgctgcacccattaactcgtcatttatattaggtgtatctcctaatgctatccctccctgctacccccaccccacaacaggccccagtgtgtgatgttccccttcctctgtccatgtgttctcattgttcaattcccacctatgagtgagaacatgcggtgtttggttttttgtccttgtgatagtttgctgagaatgatggtttccagcttcatccatgtccctacaaaggacatgaactcatctttttttatggctgcatagtattccatggtgtatatgtgccacattttcttgatccagtctatcattgttggacatttgggttggttccaagtctttgctattgtgaatagtgccacaataaaacatatgggtgcatgtgtctttatagcagcatgatttatattcccttgggtatatacccagtaatgggatggctgggtcaaatttagctttgactatcaagactagaaagcaaggataggaaggacaagagattcctggatttcaatgcaagattttaatatctttttttttttaagtatacattgattacttttgtaaagtttataaaacattataaataacgtaattcaaaaggaaaaaaatactctctgccttgaaaaacaagtacatcccaaatggaatgaggatcctggaactatggggaagtacaaagcactccagagagtcttgaacttcggccatgtgatggcacagaaggaatggatattttccccttgacttcaagtttattctttctccttccacaatggtctagcataaagtaaatcctctctgtgtttttatttaagtgtatatgctaaaataaattttgtggaaaaaagacaaatatcttttacatagtctagtgataaactgacaaaaagaaaatttttaaatacttgggtgataaattatatcagatgattcctaatgaataatgggcactgatacaaacaattcctaatgtataatgaggctgattgttttccttcctttggtttctataattaggtttaaaatatccctgcaaggtgaagggaattatacttttaattttttaatataatattgagcatattcaattaagggtgtcaacatagcagagttgattctatgcctgctatttggagactcgctatcatggactttgaagaacattatgttttactttaagaagaagatttgtgttactaaatacatggagacacgagggagaagttgaagattgggttaaagaatgtaaatgttcactctgaatttacctactgctaaagacccaagttaagtaagtgtattttcatgtattaaatacactttttatttaatgtattaaagtacacttagtacatttagcttaaataagacaaaatttgcctatatgtattatgacttcattttgaaacaactttctgatgtagtattgttccaaatattctaaggagaaggaatggttcatcttgaaccactttatccctgtagctctaagttagagcaagcaacacatcttagtgatcaaaatttatttcttgatttagtgatactatgccttctcttctatatttgctttataaaggctcacatacttgtggtcactgtatttctgccctgagacttctatttcttataacaaatacttctgaattcattatatttcttaaagtttatccttaccaacacatattgttttctcttcagctttttgaagtcaattcaagcaaatcaatgtaaatagactgcaaaatttgccatcttctttgaaaatggcctagccaattgtgacaaaaattttaagttgacattcttattttccattggaatatttctatttttattgtagtataagaaaaaccaaacatatgtgtgatattaatgtattacatttgagactaaaagcctattatttcactttgtttctgcctacaaaatagatgacagtagaagttcattttcaggattctaaatattagaagtattcaaatattaaattttttgaaattatttttaaaatgattacctatgaaaaagtgttggctgtataataactgaggaatcaattgtaaaaatgaagaaccaaaatgtttgcactagagagccaaaaggatagatgaagaacaaggtggtagaaaaaagattgcattttatgtcatttcaatttgtgcaccatatgatgtactacgtatttaaaataaactgaaaggcttatgatggtggtattagccactctcaaaaaagctaaaaatgaatggtaggtgttcgctcggtggcccaatctgtgtgacccagacaaggtgttgtctttttaatgatgattgagagtgttataaaaattgcatagattttatgaaagataatttgttacaaaactggagatactccagatgtacaagatgaaagaagtatttgaaaaggaaagacgtaacaagaggaagcagatgacactgatggatgttttttaaaatgcgctcgtaacatccgctcctttggtttcacacatgctgttagaactattcctgatgaactgttttcctacaacactatctatagatcaataaggattctctgggaaataaagtttcttgcttttttttgttattaagcaaaatgcctgttgccacttttaaggggaaaaaaccaatattgcaaatttattttcaaaatggaatatttgcaatgcaattatttttccacttttattaaatatttagaatttatttctctctacttttaaagaaagtattttaatgtatgtaaaatacagatatttaatacatttttctcctgacttacatgatatgtttatggacaacacaaagttgtttggaacaaatattatccataaattattgactgcttatcataaatccatattatgcagatatattaaaaaccacaataccatctttattttttattagtgtgttttttagaatccacactatcaaatcataaaaacattgctaaaatagagaagggctagtcctagacatcaaagttaagttttatgtgtatataaaaaactttttgtttaagatggaatctcgctctgtcgcccaggctggagtgcagtggtgtgatctcagctcactgcaacccctgcctcctggattcaagcaattatcctgcctcagcctccggagtagctgggattacaggtgcccaccaccatgcccagcaaatattttttgtatttttagtagagacagggtttcaccatgttggccaggctggtcttgaactcctgacctcaagtgatctgctcacctaggcctcccaaagtgctaggattacaggcgtgagccaccgtgcctgacctaaagtaatattttaatacaatgtaacatccttcccaaatatactacagtctaatttaaatttatattgaacattaggaaatataaagtttgaaattactcatttttcaaatgaagaaattaaatggataaaagtctaatgattttatcaacaccacaggactagctagtagactgaacacaggaatggaagttgctgtcttttagcccagtgttcttgcttctaactcataaactcaatttgctttttggaagactcttctaatggttatgaaaatttggaaatgaatttgactatatccagctgatcttaaggcatcgtcatgtgttttgacattggattggatttagttttgagacactgttcttaattcaagaatgttcactactattggatataggactgatttctgggcattccaagattggaatcaaaggataaagaagtgtgagaaaaaaagcaatagggaagtattttggaaaacatttctagagcaaaacaaaacacaataaagaattgaaaaactcaagaaagaagatgagctggaatacaaaggcaaatggtaagcaaagaaacaaatacaacttatatttagtatcaactaaatgttgatgtgaaacacagactgagtaaactgaaactaaattgccagatgatctcaacatgtgtattggtatgagtgacatgaaacaggaggcaatgaaagcatgataacatttttgtctcatttggggagtggttatagatggtgttaaactttagatattgatataaaactacactgggattaaatacttgtactcacaaaagaaatcggaagaatcgagataggatatataatttccaaactgccagataaaaacaacaaaaaagtgagtcaaatgaaatacaaataaaaggatgaaatgtgatagatgaggtaactgttaataaaaccactgtggattgagaaattttaatgttatatatttaatgtctaaatatgaaaatgaaagattttttgtaataaaaaagttacagtgacaaaaacactagaataaattaaaaattcacaattgttaactaaagattttaaaatgtttttcccaaatcaatagaacagttttcccagtcatttcatgtcatacagtagctttacatgagataaattttattttacatatatgtatttatttgtatgaattaattaagtattttgtacccaatatttttaacaaagtagactggacctatgtataataccttaaattatccttacccttcattcacatttaaatccattccatacggtaccatactggagtaaagaactctaaatgtgttgcactgtttgctattgtctccaacaatgaattggggggaaggagtgggtgggcaggaacaaaccctacttcagaaattttcaaattataatgaaaaatgtttcattcttgctcaggatgtacatagcattcatgcgaatctggaaactaaccagtttctttacaaggaaggctttctaaatatgtaacaagagctacaactgccagataattctaaatgagaagctaacagttttcttccagctctaaaaatactaagaaatccttcagtgtttctgttctaattttcctcatgctaattagatgagattgtcattttagaaaccaccctactatgttctttttctcctttaattagcacattagatcattatctgtgctttaatgacccaaaagggtgacaattacagctgttacattcaagcctcactggaatgccctacttggggctcatgccacaggcccactggagacaaagtcagcatttatgagtcatagcgtccctgtaggatattaaactgcttttcagctgtgtcccacatgtatcttgttctctgtcaggaaaaactcagaatccagaaaaacttccacaaaacaaatgtcatctacattgtaagactcatctgactggatcatacaaattcttgtcctgaagaaatagctttctgtaagatggagagttgtcatgataaaattcccattaacatggatcacatccttgcactaatcagtgtactcttagatttaaaacactcgtaaactgatagatgtaatgtccccaaaatatttgttcctatttatatgacttttctgttgcattattttttgagtaaagagttgttatgagtaatttctttcataataagaacttttgagttaatacactgaacttatcccaatgcagctaagaaagaaacaaatcatttgtattagcccattctcacgatgttaacatggtggaaggcaaaggaggagcaagggcatgtcttacatggcagcaggcaagaggtcatatgcagggagctcccctttataaaaccaccagatctcatgagacatattcactatcatgagaacagcacagggaaaacccgcccctatgattcaattacttcccactgggaccctcccatgacaagtgagggttatgggaactacaattcaatctgagatttgagtggggacacagccaaaccatatcataattcctggtgaaaaatctaaaatatgtgtttccattagttttgaaacaatggaactgtaatgtaaattgataatcttagagtcaattattttttcctgaatgtataatttgggaatcttaataacaacaaaaaaaaatagattactcagttacaaaagtacaacaaatattttgggaggccgaggaaggtggattgcctgaggtcaggagtttgagaccagcctggccaacacagtgaaaccccatctttactaaaaatacaaaaaaattgctgggtttggtggcaggcgcctgcaatcccagctactcaggaggctgaggcaggaaaatcatttgaacctgggaggcagaggttgcagtgagctgagatcgtgccattgcactccagcctgggcaacaagagcgaaactccatctcaagaaaaaagaaaaatggattgctcagttacaaaagtacaacaaatccccatgacacaactttacctatgaaacaaacctgtacttgtaccctggacctaaaatgaaagtttaaaaaaaaagtacacaaacactcatggacatatatttaatttaaaataatttcacatacccccacacaatgaaacctgttttaatattaagattattaaggatctagcttctcaaaagtcttataatctttaaattgtaaacgtctgaatcttggaggcctagcagatgggcgaggagagaacaatacacaaagccaaaaaaaaaaaaatgcctggaatgtgattgatctttggaatttgtgcaaacacatagggtggtgcctactgaggaggctgcagaaagggagtataataaaaaatcatatttttctgctttaaatcaataaaattaattttataacaatgtgaaataattgtggatccagctgacagtttgctcaagggtagttcactttaaatactcagatacttcccttgcccttatcatcttaactggtcactcgcccagaatgggctgtgtttgtaagtcatgagatgcttcttccatgactttagtggcctctaaactcatgtgaaatttatacgtttaagtctggtccaaaatgaatcacatctgtttttttggaaactgtggccaacttaaaactttcaaaagaaaatgagaactaaaaacgcttcctctgtcttaacagagcagaaagaaaggatgtgaaagaatatacaaccttgacattatggatattactttatccccttatatttgcagtttttatataagaaaaaagttctaaaactaacatttggatacatgtcactgagtggcagagttgtttcaatcataactgaaatagagaaccattcgttcctttttataacaaagacgaattcttcattctgtgaatgagaattaacaaccaaggttttcaggggcttaatgttacagaagctgtcattaattataatgcttattataaaaacggaattgtaataaatcaggctgcagtcaaccacctttgaacagctagaatacttacatactcgtagtgttttgctttttttcttctctttattccatgtaattacttagatcatcctttttatttcctgattctttcttgcttatggtatttttttgcatagggaatgacaaatgaagaaaatattgtagtattatatgagttttggtagggcagtctgggttaacaaatgtactccataacatataatagaccaaaaacaatagacatgtattgctcctacccttaatagttcaagcaagggtctacttttcaaatggcagctctcatcttgtgatcattcaagaacccacactccttcatctgtgactaccaatccagaggcaaggttcttcatatttttgtttctgtgccatggactcatctttcactctggtaaagcctaaagaaactttctaagtacaatgctttaaaatacatacaataataatagggcttaaaggaaaacaattatattgacatacgtttatcaaaacatgtatatgaaatgaatttgtgatacagcaatatatgtcctttttttttttttttttttttttccagaggcaaggtcttgctctgttgcccaggctggagtggagatcatggctcactacagccccaacttcctaggctcaactgattctcctacctcagcctctcgagtagctgggactataggcatgggccaccttgcctggctaagtttttcttatttttggagagatgggatctcactatattgcccagattggtcttgaactcgtggcctcaattgatcttcctttctcaacttccaaaagtgctaggattacaggtgtgacccactgtgcccagccctatgtgtgtttttaaattagtattagataaccagatcttgcaacacagtgctaataaccaccataattttgaagtagtgatgaaggcaaacagtattttgagatatctgcagcagaagagctgatacaaaaatatctatgattttaactgggagccaagtcacaggtactactatgccactgggatttgttggctgccatcataagagaaagaaattataaatttcagttagatccagttaaaatagagatgtaatttgttcccatccaagttcatgaactccctgaattctatccacaaatccccgaaggctaagaatctcagcccttgtctgccaaagccagcaggagggaaaagtgagcatggaagagcatttagttctagtacttggtgctgatattaactacaagtataatggaatcaaataatatccacaatgtcaatatcgtatatccttcccctgttatgaactttgtccccaaaatggcacatataacttcctattgaccataattcagacatatagggaagtaggaagggagggaacagattctatgaaaaatatattttctttatttttattttactttaatttctgggatacatgtgcagaacatgaaggtttgttatataagtatacatgtgccatggtggtttgctgcacctatgaacctgtcatctaggttttaagccctgcatgcattaggtatttgtcctaatgctctcgctccccttgtcccccatctcctcacaggccctggtgtgtgatgttcccctccctgtgtccatgtgttttcattggtcaactcccacttatgagtgggaatatgcagtgtttgggtttctgttcttgtgttagtttgtggtgaatgatggcttccagcttcatccatgtccctgcaaaggacatgaactcactctttttttaatggctgtacatgtgacgtatttttttttaatccagtttatcacagaaacacttttacactgttggtgggagtgtaattagttcaaccattgtggaagacagtgtggcaactcctcaaggatctagaaccagaaataccctttggcccaacaatcccattactgggtatatacccaaaggattaaaaatcattctactgtaaagacatatgcacacgtatgtttatcacagcactatttatattagcaaagtcatgggaccaacccaaatgcccatcaatgataggctggaaaatacattttctagtagtcgactcaatttacagacctgaaagaggcagtccaatttagttcctgttaaaactgttgtgatcagaagggtaaattatccttgcttgttaaaagtgtctctgtctatgttcccatgcttttactgttttcgtttttttcttttctatgcccattttggtttatacgtcattgtcacaaaatgtactgacaaatgggatttaaattactattataataacatagcatgtggaacaaatattaatttctaagctcatgaacatcatatttctagatctaagctgactttttacctagtaaccatacattaatgactcatggacagtatgtattctatataagtgccacagaaatcaagtgagtgtctgataaagcccaactcacacctcatggcacaccgcggaggaagggagtgactctccttggaaatcagaaagatttctaagtgaagggaaagcttttctgggaagttaggaattcgtagtacttcaactggtggacctaaggaaattttgtcccagaaaacattgtgaacaaaggagaggaaaagcatgttctgaaaatgattactatcttgggttgactgtagcatagggtcataagggaaaataaaacgatagtccactctaaaaagtataaaagcatcagagtatgaataatcttgatgttctgccaaaattggcagagagactggttagatagctattgtaaaattcagagaagagtaagttctcatacaattcattggctagggaaagggaaatgagtggattattttgaaagataatttagatttagaaataatagttcattacagagaatctgtttcaggaacaaatgtgagagaggaaattgagagagtagcttctgatggttaacctagaggatggtggtgctatctaaaccacggcagaagacaaaggcagtggggcagactgagggaaagaagataacgggctcagtttgggacattttaggtctgctggatgagcaagacatgcatttcacactcagagaaacagtctagggtgtaagcctgaaatgtaagagagggccagtatttgagttataggtctcctgggaaccagttaggacatatgagtaaaatcaattaggaaaggactgtcaaatagaacatcagtcaattttaaagcacctagaaaagcagttccacacaagaatcaagactttctcatactagctgcattttttattgcattcaactaaatgatggatgagaataaaaaacatcaaaagactcataaaagtaagattttaaaaatatgccctgctgcattttcagggacaagattaaaagtaagggtttatatatttatttcttttatatatttcttttcttatatatatatatatatatatttctttttatagatgatgaatgacaagtgtgtcattgttaataggttctctcaaatattgaagaacttagaacttctattagaaaatacctcataaagcaaaactgggccacatgtccatttctgatccaatcactggcaggggaaatgggataactccttggattattagtctcttcctggaggatgaatggaatttacttatcaagatacttagctatgtgtattaggtgtggggtagagattacctgaaaacacaagtcagaatgctcttggaaagaaaggaggagtggatattatgaaggcaaaagtaatgtctattgtatcttgatgatctggctgattaaataacaataacaacaacgacacgttttctttttaacctttattatttcgtattattctaaaaagtattagttcttcctccttaattgaatacagtttataaaggattttgccctcagggttatcattctgaattagcatgaatcatcaatatcaaaaatatacgtgtaaaaaatgtagataattgagccaaatacaaacaacatcagaaaatatattggaagatatctgatgaatttttatgatacatttatatttttaaaatgtaactttacaatggagagatgttgtttgtcatgttttccggttaatgtccagtgcctaaaaagatgcctcatacatagtaggcactcaataaatatgtgtgaaatgaataaatgatgaaaatctttatatcacttaaattgtgatttttatctttctctgaaaacagaattctccgtaagtattttatttccgatgactttcattctattattcccttttgtaatattctttctaaatttcactatgtgtaacctcatttgcccttcaactttatccaaagttctggatgtattcatattgactccttctttccctttttggcttttaaatatcctggcataatttgttttgactgggtagaactgtgttcttttggacagccaacttccttgaactctgctttctaaaagaagcccaaggattcatcgtactaattttcaaatttgatgcaattagcttcataaagttaattttcttaattctgctgacatttccatttccttcccttagggaagagaattcgatttcattaacttgtgattgtttcctcaaggtttctttctactattagaagcccatctaatttttccctatgagcaagaataaaatctgatatctgccctaggaattttacctttattacagaagatcaagccatgagatctcattgcttcagaaatactttgtcatcagtattcagtttgatatgcgcctgtcaatgcttcttcatctttatataaaattgctttaagtcaactaaaaaaaaccttattaaccttcttttactggtttagtgatttatataatttacatttttataatgtggttattttctgtgttcttaccatattaactttaatccaattattatttccaaacaattccattgctacacctttattctggatataaaaaagcattaatttcacaaataattatgaaatgagttctcttttctaagctcatcctctagttccaagtgctattctactcattgtcaggtatgttaataacagcttaactctggccctgagatggggcttccagatattcctgattaattccatcattcaaaagtcacattgaagcctatttgcatagttgtatgattatttcctcacaaaagaatatagtaattaatagataatgagatatttaaaacatattatgatggtcattgaaacgatatatgtcagtgttcataagttgataattttatttaaaaagttttaaagaaagtgagcaaatgaagtgataaaaaactaaaatcttccactggtttgtattagaaagaaaaaacaaatggtaaaagagttggtgagaacccagagaagagttaaacagatagctaaacctacttattaaattaagcaggaagatatcagttgactaaagtgacaagatggttattttataaaaactttaaagtgcttcaaattatgccttgttaattctttttatttcttcaactaatatattttgagtgttagtatatgtgagttattacagaactactgaatgtgagccagagaaattggattaaaaattacggtattgcatttgagctgtctaagggatgattagggtaggcctccacaggtaaacgaagcacctatataggtagttatttaaagaaatatagtctatgtgtctgtttttgtgccaggcccattctattttggttactgtatctttgtagtatagtttgaagtgccagctttgtttattttgcttataattgcattggctatttgggctctgttttggttttatatgagttttaggatagttttttctaatcctgtgaaaaatgacattggtgtgatagtaataacatagaatttgtagattactttcaatactatggctattttaatgatattgactctttcaatccatgagtagagaatgtttttccatttgtttgtgtcatctgtgatttctttcagcaatgtttcattgttttccttgtagagatctttcacctccttggttaaaagtattcctaggtattttatctttttttgtgactattgtaaatgggattgtgttcttcatttggctgtcaacatgaacattattgatatatagaaatgctactgatttttgcacattgattttgtatgctgaaactttactgaagtcatttttaagttccaggagccttttggtggagtccttggagttttctaggaatagagtcatatggtcagcaaagagaggcagtgtaacttcttttcccatttggatgccttttatttctttttcttgtctgattgctctggctaggacttccaggactatgttgaataggagtggtgagagtgggcattcttgtgttgttccagttcttcgagagaatgcttacagcttttcccatttgttatgatgttggctgtgggtttttcatagatgggtcttattattttgaggtgtttcctttgaagcctagtttcttgagggttttatcatgaaaagatgttagattttatagaaggcttcttttgcatctattgagataattatatggtatatgtttttagttctgtttaggtggtgaatcatagttattgattactctatgttgaacaaactttgcatcccagtaatgaagactagatacaaacagctcacaaacatgagaaatgctcaacatcactgatcatcagagaagcataaatcaaaaccataaagagataccatctcataccagtcagaatggctattattaaaaagtcaaaaacaacagatgcttgtgaggtcatgggtaaaaggcaacacttatgcactgttgttgggaatataaattagttcagtcactgtgtaaagcaatttggaggtttctcaaagaacttaaaatgaaactaccatttgacacagcaatttcattactgggtatatatccagaagaaaataaatcatcctacccaaaagacacatacactcatatgtttattacagcactattcacaatagcaaagacatggaatcaacctaggtgcccatcaaaggtggactggataaagaaaatgtcataaatatacactgtggaatactatgcagccataaaaaagaacaaaatcatttcctttgcaacaacatgaatgtaactggaggccattatcctaagtaaattaatgcaagaacagaaaaacaaataccacatgttctcacttatcagtgggagctaaacattggttatcatggacataaagatggcaataacagacactggggactactagacatgggggagaagggaatagtatccaactgacagttggatactattttcattacctgggtgatgggatcattcatataaaaaaccctcagcatcacacgattcacccatgtaacaaacctgcacacgtacccctgatctaaaataaaacataaattatttaaaaaataatttaaagtttttttaaaaattagaaataaagataaattatttgaagagaaacatggtaattaggaaatgggtattctgtttaattaaaatttaccagtgtgtattatgtatcaaaatacttgatttaaattttgttcacggctttcatctcaacagttctacttctagcaatcagtctaatggaaataacttataatatccacgaagaattacagaaaggacactatttgaactgcttagatcttcccaccactccaggcagagcctgaaacaaggacttgtaatagtgtagtgatatcaggctgctggaatgaaggataggagagattaagggaaggagaaaaagctataataatgtctattgtcaaggtcactaaagagggcaactggggcttggcttcacctgacatctcaaaagcctatagaatgcctctaagtttttctctggaggatcaactgagagatgcattcctccgtgaaggcttatatctcattggctgagggctactctgcaggggttacctatgttatccacccccactccactcctgctacaatatgcattaattagtgccaattcttgggcattcttggccacagagtgagggaaagaaatctgttttaggagagatactgtcagcttacagtgagttgaaacccacacaaaaatatctactgcacttgttgccgaattcaatggggagacttggcaggggagatagcatgatcacgaaggtggttttcccaaggcaagatttattcactgcactctggatgtgctgacccctacgatttccgcccaatggggaagcttgactgcttagtttgttgtggcaggggactgtgttcacacttttcccgggtctaaaatattaaacgacaacaacaacaaaaaaatcaatggggagagctaggacatggaggcaggacattagagccatttgatttaaaaaatcatggtggttattttaaaatatgttcaaaaattggggttggccaaataaaccaaatatacacaaaaatggagtttggttattatagtatacagctaacctgtatgacaaaatattttgtagctacctaaatatttttagaagaatatttaatgctttaggaaattgttcgtaatattaagtgaacaaaataaataataaagttatacatgtattatttatatgtgcataaaattatttgaaaatatatattaacatattaacagtggtgacttgggtgtagtacaattatgaattatggtttatcttcatttactcttttgtacttcttcatatttcctaaatggtttacaaagatcatgtattattttagtaactaaaaaatcaatggaaacaaattttcattgcattgacttcattctatagttccactttctaggaattcctccaggctttgtgaactatggactcactataaaatcttttctcaaccaaatgttcaacgtgcaccctaaagcctcattacaaatttgactaactatgatttggtgatgtagcctcagctcaagcctcctgtctctcattgactgaccctaaaaagcaatactgtgtacttggagatcttcagaatcttcagtgtagataagagcacattcacttaattgaattatttatccttgattcagccagcagagacagaagagccaaaaagaaagaaagaatgttgagaaaaactaagcagtcaccaaacacattttgtgtggaaaaatgcttacagaattatttatttgttgagaaagaaactgtatctggaaaactataagggaaacattgtggttagttttgtggacacttgatgctcatttaatgcggagcagaatctaatgtcacatgacacagcactcatgctaccctctctggctcattttctgctgcttttttctaaacattctcacataataaattgtgaattgagaagatacacagttcatctgaagattttatacataagacataaatgatgctgaaaaaccaagcagatagcctatgattaagcaagtgagaacaactagtttgggtatgaaaaagctacattacagctgaaagcaacaaaatgccagctgtaacctgctgagaaaagaacaatggctggtttgtagtagttggaaacagagtggcttttcctgagcagaattaagactgatggtgaacttaagagggggaaaaaaattaaaaatctgtggccaacaagcatgaaaaaaaactcatcatcactggtcattagagaaatgcaaatcaaaaccataacgagataccatctcacggcagttagaatggcgatcattcaaaactcaggaaacaacacatgctggagaggatatggagaaataggaacacttttacactgttggtgggagtctaaattagctcaaccattgtggaagacagtgtggctattcctcaaggatctagaatcagaaataccatttgacccagcaatcccattactgggtatatacccaaaggattataaaacattctactataaagacacatccacaagtatgtttattgcagcactgttcacaatagcaaagtcatggaaccaacccaaatgcccatcaatgatagactggataaagtaaatgtggcacatatacaccatggaatactatgcagccataaaaaaggatgagttcatgtcctttgcaaggacatggatgaagctggaaaccatcactctcagcaaactaacacaggaacaaaaaaccaaacactgcatgttctcactcataagtggaagttgaacgataaaaacacatggacacagggaggggaacatcatacagcaggacctgtcaggggttgcaggggctaggagagggatagcattaggagaaatacctaatgtaggttacgggttgatgggtgcaacaaaccaccatggtacgcgtatacctatgtaacaaacctgcacattctgcgcatgtatcccagaacttaaaatataattaaaaaaaaaaagttagagttggtgccagattaaaaatataacccaaaaaattattatcaaatttttgaaagaacagaaaaaaatgcttatctgagaaatggacttttttcttctgctacattttattatttttacagaaagttgaccatcagtaaatcaccactgcatatgatagaaattttgaaaatttcaagagcaataatttgtcttgtagtattatcatattggtaaatttcacttctctatggaaatcttaaaatctatgttcttttgacaaggaagtgccttccagtctaaattataaattcatatattcaacacatatttctgcatatctacaaggtaccagatagcataattggttctgaagacacaaggataaaaaaagtaaaatttttggttatgaagtttgttatgaactcccagtgtaaaagaggagataaagatgtaaagacaatattgctgtacaatataccaaatacaaaggtcagaaggaaacattagagtggagtagtaattaacaacatagactcaggagccatttgtcttggttcaaactcctctttcaccactcactgtaatgggtacttttggagcatttacctaaactacttttgtctcagtttccccatctataaaatgaggataataataatgcatctgccttttacgatctaaatgaaaacaaaatgaatcaatatatgatttatgtatatgtaaatcaatatatgtaaagaacagggtctgatacgtattaggctttaagcaagtgctagctaaagccataaatgtaagtagttgtgaatgacgaaaggagaaaaggctgctgggaaattgtcagggaaaggcttgacagaggagtactctgaagatgatagagaatttgtgagattgaatgacaaaaatctgatctaacactattctaggtcatgaaagtcatttttaagcaaaaaatgtaataaaatacattttaaaaatctaaaactagtcttgataggtggggttgatacttgtgtgtgtgtggaggtcaagctatttctataatacaaataatcatatatattgcagctcatctttcactgggagagactaaggcacagattaatgtttacctctcctgtttttacaatgactttccaccctgcttttctctaaacttcagatttcttaataatttaatctgatatttttaatgtttcagccacctggccagtatctgtaaatttactgaatttgtttcttaaaatgtctgtgatcactaatgagctattttattctggaagagactttaccagcttttgttacatttataagaattggctccagaaacttaaaataaagcttactgaagagaaaactccttaagggctacaattgtgtgtttttcatcttaatattccatttaacaaacacccacaatgtgcaggtactgtattatgaacattttaatgtaacagctaccagttgaaactataactagatgtggagtaggtgttaaaagcatgtatgttatactgcactactgtttggagtatgttgatatatacgagtgttttactactgttatcttccttcaatttttccagttattttgatgattatgggattggggtgtagaaaactaaaagaaaatagactttaatttggaccaacagctggtggttacacatgtaattaatggggaaggctgtttactggtatttattttaaaactgatcccatccctgccaaagaaaatgtcagtactgaaacttcacatattcaaacagccaaatttgtctgccatgaacttgtggcttgatagatttatttaatttttttatactgctcatgtacgagtcagaatttatataggtcatagcatgttattttcatttgataataatcctctgtttttaatgcagactaagtgaacttcatgacatatactttgggatatgaaaatgaatgtcttaaaatatatttcatttgtgttttcccatactattgagacatttcagtagctaatggaaaccataagttagtctaatgaagtccatgtataattttataccatagtctgtgcaactttgacattttcataattaaccaaagtctgggaatttagttctagattggtcttttgcccaagcattcaattcttgaatgtgattaagaagctgaattttatatttgagtacttggcttcagttcctagaagccatgctactgaaatcatttggtttctaagcatttccttttggagggaataatttccataaaatagtgtgtttcttagatatgttttggttctctagtctacataacactattctgtgtatgcaacattcccttgcctttgtgtggttggttcttcatcattttccagattttggcttaaatatcacttcctaagtgacctttcctaaagaatctatgtactttctactagaacattctctatctcagattattttaactagtcatatatttatcatttgtgatatctagtattaacttgtatctttaatatgccccagatatatggaaactgtcaactgctcttattgtttctgctcttggtgggtgattcagataattgtttattgacattttgaagttgtaccctttcctgaccctgtggaatactagaaaagattaatacaaacaaagtaactttttcttattttcttagctgaatatgcaaggtcgaagaatttaaacaactagaattatttatatttggttatatattagtgtatataagattttcaaaagaacaaatcttcaaagcctctgatactattcttcttttcaaatactctcttcttttctcctctctccctccagagacagtgaaactgcttccctgctctgcttcgggactctgcatatttgctctttgttgtcacacagacttctcaaattcaacatatttaaagctgaaatcatcatatgccacccaaactacattcctaatgactcctcttctgatgtgccttaccttgattattgctaccacccttccaccaccttttctgagccaagatctgagaatggtgtataattctctctcaacctaccagcccataagtcaccatacatagctatatgtctatgtgtacatacatacatatagatttgtaatgtctatctctatcaatcgtctatttacctgtttatgtttatattgctctttcataaaattcaattgagttccatcctctcatctctaccacttctgccacttgctgagctctggccatttttttgatctgactactcaatcaacctcctgtatcgctccctccagttcattctaccatcccttactgatttttttctgaaagtcttcccttactactttttatatgcatctatccttctccccactttgagctttccacatataaaggagcttcttgtaatacttgaatgtactcttcccttccatgtcacccatatgttgtatattcattgttttttttctctgaaattgtcccaatactttacttattccagttaactactgtgtgcccttcaaattttacctaagctacagtttcatctcaaatgagtttttaagcctctcatttcaggtgactgttttctatctccatagtgtcgtgaatgccgtgtcagtattattactctgtatctattgtttttattttctgcctctttcacaaggctataactgtatttaaaagaaggattatgctctttatctaaatctctggtatacagcatggtgtctggctcatgatctgtgctcaacatatgtagataaaggagaaatagccatgcaaccaagaacattggcttctatttgaagaaatgttgtggctggaaaaaggcgacgtaaaaataattggcacataaacctttgcttcaggttctgcttcctgtatgtcaggaaatgttctcggtgttttttcatgtataaatgcatttgatcagtgcagccatcccaagagataagttctattattacccatttccatattaggaagctgaagtgcaaagaagttaacttacctaagatcatgcattttcttagcctgggttcctctgaaagctgagtctgtggcaaaggtttatgtgctaaaatagtgttagaataaggaaagccagggaagcaggggttaaggaaaaaaaaattggaactggaaagaagagattcaatatgaggcagcattactgagctgatcagcacctggtgtctagtgcaaatgatggggatctttctggaacaccttttgacaggccttgtaatgaatacatctcaagactacccatcgaaggagaggaaaggggaagaatgatccatagattcatgtgtcccataggtcaaatgtttttctcatatttatttttggatcatgcaagcacagttgtgtttaggatctcctggcactttgttttatcatcaacagggatgcaccaaagaaaggggcacagggtgtaatgcaggagaatgatacaaggtagagttgatttgcctcgttctgaagtcatttgaagcccgtgcatagcacattgtggcagcaatggtttagatgaaatggcagccaaaagccctgcagaagttctggctgaaaggatctgcagagatgcattaggaaagtctgatatgtccatctaataaatggtgaaaccctaattcaaatgctagaagtctgactccagatcccgtagtcagcgacactctttagccaggacagaagaggccgttgcccagtgctttggctggccatgtatcacaaagacacacaaaaaataaaattattgaagaatacgtggatacctctgtttctagcaaaacaacactttcaagccaatatagtctttctcttgactgtatactgcttaggcctcagagaaatgcttctccacatctctttttctgtcccatacatccaatgccagcactgagattcatggggttgctgacatgaagatggacacgactcagattatgaagaggatgtgaacagctgaagcacttaagtaaaagacaaaggaacttgtcaaactcttctttcggatagaatgactacaagaaattattacctaacaaaatgtcatttctcagcgttccaattcgtagtttagaggtattcatggagaagcatgatattctcaatagttgtatataaagtgtaagggatattttgatgattctagttctctacatggccatctggattactactgaatgttctgaatatgagtagttttatttttataaaattattaggattcaattaaaatttttacataaacactcagctgtattatataacctaatttaaaattttcctatacatctattataatttgtattctgttcctcaattttagtagataatactgaatctgttagaggaaaaattacttctgaagcacatataagataaaattttattttatttttacatttaacttaatgcatatttcttgataaaaatgaactcttgtgacctctgaatgtaattcaatgctattattttagttctttacatctttagatggcattagaacacaaattatgcaaaaagcttgataatagtacaattcatgattttgcagaaacaaaggcacaaataagttcgtggaatccacatataataatttgttaattgtatgtgcttatggaatatctctgcagacctcatagccatcaacaaagtaccagccacgtgcaataacaatagaatttagtaacctctggcatttggctgactcagtcattcaaaaaacataaagatattttctagtttgttattactcgggtgtatataacacattttattttaacagttggttagctagaaatataacttttccatatttagatataatgtatgtgtgtctctatttgtacacttgccccacaaatattaggagtagctttgcccacgtttacaataaatggctgtgctctgctccaccgtacttcactttaccctcttccactctgcagagtacacgcttctctctgttctgctccacatctctaccaccctgcctcctgatcgtctcatggattgattccatggagcaacttattccagttaagcaatggatactaaactgacaatactaaggtattgtcgtagctcacttaaactgtactatgtttaagtgtctatatacaaatatgaaaacagttacaggtgacaaaaactaaattttccaagctacagtacagtacaccataatgctttgagttcttgaggaaagcactattcaaatatcagctccctcctccagcctttcgcaggatttcatttaagtcatcttatttcattgttcttccttgttttgttcttcccttactgacgtagtaactcaggtaagttccttgatactataaatttcataacgcatttgcttattatttcatttttgtttatgaccaaatgcattctagacttttaaaaattttattgagtagtgctgaaaatatttctaaaggattgtagttttctcattttatatattctctttaaaacgaatttccaataaggagcttctggggagggaaaaggtaataaagtgttggatcattttttaccttaactgctatttcatctctactttctctgttgacgtcacagacattgggcagtacttttaaaagagaaactgttggcttgacacttagatattgtttttatttttttaacctcataatcacaattttggcatgttatactccataaaaatcagattattataaaatgttccattcttcatctccctgggtgggccacagaggaagatatggctgctatagagctaccttgaaggagtacccttacagtaatatgctcatttaaaaccacagagtaatttaaacatggttttgtttttccttacaaccatattctccaacttcttcatagaaatctcccatgatggccgggcgtggtggctcacgcctgtaatcccagcactttgggaggccgaggccggcggatcacgaggtcaggagatcgagaccatcccggctaaaacggtgaaaccccgtctctactaaaaatacaaaaaattagccgggcgtagtggcgggcgcctgtagtcccagctactcgggaggctgaggcaggagaatggcgtgaacccgggaggcggagcttgcagtgagccgagatcccgccactgcactccagcctgggcgacagagcgagactccgtctcaaaaaaaaaaaaaaaaaaaaaaaaaagaaatctcccatgatgtaaattttgatattttgtgttttcgtatgatggatattttgtatttttaatttcttatatatgacaactaaaataaaacctcccatttcttcttctttagttcttatacaatatttggttattcaaaagctctatttccacttatatgttatctagttctcttaatatgttctccattaaattcagaaatatagaatgaaatcctcaatatatttcctgaagtttagtagagtttaggtccatcatacgagatagcaaagctatccatcagataagcatttttaaaataattcaagtagtcactcaagtatccatgccaatcaaacaaaaaattggcataaataattaaatatttataaataacctgctttgctttttgtggcaacacagatgtgttattgatgctaaatcctcacatgggaggaaaatcagatgtccaggcatgacagacttctcagtatcaagcagctctatgtctcagaaatatgttcttaaccttacttgacccagctggaagcaggacagcagctgagaggaaaagcacagtggtgagggcagaaaaatctcctacccttctggctgagttagttctacaatgtatattttctactacaattatctgaaagttgagtaagaagtcatgacatccagaaaacatatctcttataaaatcctctttggtccagagacctatacagatttcttgctccaagactgcttgatgttcatgatcatgacaattggtgatactcacttgacctcctcaaactacaaatatccaggatatctggccctaaagtaggaacttttcaaagcaaattaataatttctgtggaaaatgttagggtattaaaaatgtaatgtgtgtatgtgttgttgcttctgatgctctatacatctcatttatttagaggtggtaaagtgccttaacctctaatgttaataatatgtaccttaaatagctattattgcagttatctaaaatgacccttttatctgtaggaaaaatgactgcagacaaatgggttatggttatatattttagcaacaggttgctctttacagaaacatgttttcgagagctggcaatctcctactaagatcaaatagcttttaaagtcaagtggtgaaattaaatgactgtgaaatatttggaatgcaagttgctgcttagaaatgtacaaatgagaatagtttagaagatactagctaaaatcaaaatgttttactgaacacagaagtaaaagggtaggcaacgtaaagtgcaaagcacttgaagcaatatgcctctacagccaaagagtagatttatttatgagaaatttgtggaacgatatgacaatttactcaactgtggggagattacttgtgctgtagttttcaatatatgataaattcaaaatattttctaatccagaatatatggaacatctcagaatccgtagctattccattaaatgtcatgagttttggctatattgaaatgtttttactgtcctcttctctacctctatgatttccacacagaaactcctctgcttttacgcctttcccctccatttttttttttttttttttttttttttagagggagtctcgctctttcgcccaggctggagtgccgtggtgcaatctcagctcactgcaagctcacctcccggattcacgccattctcctgcctcagcctcccgagtagctgcgactacaggcgccagccatcacgcccagctaattttttgcattttttttagtagagacggggtttcaccgtgttagccaggacggtctcgatctcctgacctcgtgatccgcccgcctcagcctcccaaagtgctggggttacctgcgtgagccaccgcacccggccccctcctttattattattattattattattattattattatactttaagttctagggtacatgtgcacaatgtgcaggtttgttacatatgtatacatgtgccatgttggtgtgctgcacccattaactcatcatttagcattaggtatatctcccaatgctatccctcccccgtcccctcaccccacaacagtccccggtgtgtgatgttccccttcctgtgtccatgtgttctcattgttcaattcccacctatgagtgagaacatgcagtgtttggttttttgtccttgcaatagtttgctgagaatgatggtttccaccttcatccatgtccctacaaaggacatgaactcatcattttttatggctgcatagtattccatggtgtatatgtgccacattttcttaatccagtctatcattgttggacatttgggttggttccaagtctttgctattgtgaatactgccgcaataaacatacatgtgcatgtgtctttatagcagcatgttttataatcctttgggtatatacccagtaatgggatggctgggtcaaacggtatttctagttctagatccctgaggaatcaccacactgacttccacaatggtgaaactagtttacagtcccaccaacagtgtaaaagtgttcctatttctccacatcctctccagcacctgttgtttcctttttttttttttgctttcatttttatttttttattatactttaagttttagggtacatgtgcacaacgtgcaggtttgttacatatgtatacatgtgccatgttggtgtgctgaacccattaacttgtcatttaacattaggtatacctcctaatgctatccctcccccctcccccaaccccataataggccccagagtgtgatgttccccttcctgtgtccatgtgttctcattgttcaatacccacctatgagtgagaatatgcggtgtttggttttttgtccttgcgatagtttgctgagaatgatggtttccagcttcatccatgtccctacaaaggacatgaactcatcatcttttatggctacatagtattccatggtgtatatgtgccacattttcttgatacagtctatcactgttggacatttgggttggttccaagtctgtgctattgtgaatagtgctacaataaacatacatgtgcatgtgtctttatagcagcatgttttgtaatcctttgggcatatacccagtaatgggatggctgggtcaaaaggtatttctagttctagatccctgaggaatcgccacactgacttcctcaatggttgaactcgtttacagtcccaccaacagtgtaaaagtgttcctatttctccacatcctctccagcacctgttgtctcctgactttttaatgatcgccgttctaactggtgtgagatggtatctcattgtggttttgatttgcatttctctgatggccagtgatgatgaacattttttcatgtgtcttttggctgcataaatgtcttcttttgagaagtgtctgttcatatcctttgcccactttttgatggggttgtttgtttttttcttgtaaatttgtttgagttcattgtagattctggatattagccctttgtcagatgagtagattgcaaaaattttctcccattctgtaggttgcctgttcactctgatggtagtttcttttgctgtgcagaagctctttagttcaattagatcccatttgtcaattttggcttttgttgccattgcttttggtgttttagacatgaagtccttgcccatgcctatgtcctgaatggtattacctaggttatcttctagggtttttatggttttaggtctaaagtttaagtctttaatccatcttgaattaatttttgtataaggtgtaaggaagggatccagtttcagctttctacatatggctaggcagttttcccagaaccatttattaaatagggaatcctttccccatttcttgtttctgtcaggtttgtcaaagatcagatagttgtagatatgtggcattatttctgagggctctgttctgttccattggtctatatctctgttttggtaccagtaccatgctgttttggttactgtagccttgtagtatagtttgaactcaggtagtgtgcctccagctttgttcttttggcttaggattgacttggcaatgtgggttcttttttggttccatatgaactttaaagtagttttttccaattctgtgaagaaagtcattggtagcttgatggggatggcattgaatctacaaattaccttgggcagtatggccattttcatgatattgattcttcctacgcatgagcatggaatgttcttccattttgtttgtatcttcttttatttcattgagcagtagtttgtagttctccttgaagaggtccttcacatctcttgtaagttggatttctaggtattttattctctttgaagcaattgtgaatgggagttcactcatgatttggctctctgtttgtctgttattggtgtataagaatgcttgtgatttttgcacattgattttgtatcctgagactttgctgaagttgcctatcagcttaaggaaatgagaacacatggacacaggaaggggaacatcacacaccagggcctgttgtggggtggggggaggggggagggatagcattaggagatatacctaatgttaaataacaagttaatgggtgcagcacaccaacatggcacatgtatacatatgtaactaacctgcacgttgtgcacatgtaccctaaaacttaaagtataataataaaaaaaaagaaaaaagaaaagaaaataaaagacacagactggctaattggataaagagtcaagacccatcagtgtgttgtattcaggagacctatctcatgtgcaaagacacacataggctcaaaataaagggatggaggaatatttaccaagcaaatggaaaaaaagcaggggttgcaatcctagtctctgataaaacagactgtaaaccaacaaagataaaaaaagacaaagaatggcattacatagtggtaaagggatcaatgcaacaagaagagctaactattctaaatatatatgcaccccatacaagagcacccagattcacaaagcaagttcttagagacctacaaagagacttagactcccacacagtaatagtgggagaatttaacaccctgctgtcaatattagacagattgatgagacagaaaattaacaaggatattcaagactagaactcagctctggaccaagcagacttaatagatatctacagaactctctaccccaattcaacagaatatacattcttctcagcatcacattgcacttattctaaaattgatcacatatatgttagtaaaacactcctaagcaaatccaaaagaatggaaatcataaaaaaacagtccctcagaccacagtgcaatccaattagaactcaggattaagaaactcactcaaacctgcacaactacatggaaactgaacaacctcctcctgaatgactactgggtaaataatgaaattaaggtagaaataaataagttctttgaaaccaacaagaacaaagacacaatgtaccagaatctctggaacacagctaatgcagtgtttagagggaaatttatagcactaaacacccacaggagaaagctgggaagacctaaaattgacaccataacatcacaattaaaaacactggagaaacaagagcaaacaaattcagaggctatcagaagacaagaaataactaagatcagagcagaactgaaggagatagagacatgaaaaaccaaagaatccaggagttggttttttgaaaagactaacaaaatatatagaccaccagctagatgaataaagaagaaaagagagaagaatcaaatagccacaataaaaaatgatgaaggggatatcaccactgatctcacagaaatacaaactaccatcagacaatactataaacacagaatacaaataatccagaaaatctagaagaaatggataaattcctggtcacatacaccctcccaagactaaatcaggaagaagtcaaatccctcaatagaccaataacaagttctgaaattgaggcaataattaatagcctaccaaccaaaaaaagcccaggaccagacagattcacagccaaattctaacagaagtacaaagaggagctggtaccattccttctgaaactattacaaacaacagaaaaagagggactcttgcctaactcattttatgataccaaaacctggcagagacacaacaaaaaatgaaaatttaaggccaatatccctgatgaacattgatgagaaaatcctcaataaaatactggcaaaccaaatccagcagcacatcagaaagcttatcgaccacaatcaagtcaatttcatccctggaatgcaaggctgtttaaacatatacaaatcaataaatgtaatccatcacataaacagaaccaatgacaaaaactacatgattacctcaacagaggcagaaaaggcctttgataaaattcaacacccttcatgctaaaaactctcaatatactaagtattgatggaatgtatctcaaaatagtaagatctatttatgacaaacccacagccaatattatactgaatgtgcaaaagctggaagcattccctttgaaaaccagcacaagacaaggatgccatctctcatcactcctattcaacatagtattggaagttctggccagggcaatcaggcaggagaaagaaataaagggtattcaaataggaagagaggaagtcaaattgtttctgtttgcagatgatgtgattgtatatttagaaaatgccatcatctcagctcaaaatctccttaagctgataagcaacttcagcaaagtctcagtgcacacatgatacaaaatcaatgtgtgaaaatcacaagcattcctatacaccaataatagacagagagccaaatcatgagtgaactcccactcacaattgctacaaagagaattaaatacctaggaatacgacttaaagggatgtgaagggcctcttcaaggagaactataaaccactgctgaaggaaataagagaggacacaaacaaatggaaaaacattccatgctcatggataggaagaataaatattataaaaatggccatactgcccaaagtaatttatatgttcaatgctattcccatcaagctaccattgactttcttcacagaattactttaaatttcatatggaaccaaaaaaagagcctgtatagccaagacaattctaagcaaaaagaacaaagctggaggcatcatgctacttgatttcaaactatactacaaggctacagcaatcaaaacagcatggtactggtaccaaaatagatatatagaccaatggaacataacagaggcctcagaaataaagccacacatctacaaccatctgatctttgataaacctgacaaaaacaagcaatggggaaaggattccttttttaataagtggtattgagaaaactagctagctatatgcagaaaactgaaacttgaccacttcctcacacctcatacaaaagttaattcaagatgaattaaaggtttaaacataagacctaaagccataaaaaccctagaagaaaacctaggcatatcattcaggacataggcatgagcaaagacttcatgactaaaacaccaaaagcaatggtaagaaaagccataattgactaatggaatctaattgaactaaagagcttctgaacagcaaaagaaactatcatcagagtgaacaggtaacctagagaatgggagaaattttttgcaatttatccatctgacaaagggctaatattcagaatctacacagaacttaaacaaatttacaattaaaaaaaccatcaaaaagtggacaaaggacatgaacagtcacttctcaaaagaagacatctatgcagccaacaaacatatgaaaaaaagctcatcatcactggtcattagagaaatgcatatcaaaaccacggtgagataccatctcatgtcagttagaatggtgatcattcaaaagtcaggaaaccacggatgctggagaggatgtggcaaaataggaacaattttacaccgttggtgggagtgtaaattagttcaaactttgtggaagacaatgtggcgtttcctcaaggatctacaaccagaaataccatttgacccagcaatcccattactgggtatatacccaaaggattataaatcattctactataaagacacacgcacatgtatgtttattgtagcactgttcataatagcaaagacttggaaccaacccaaatgcccatcaatgactggataaagaaaatgtggcatatatacaccacagaatattatgcagccataaaaaatgatgagttcatgtcctttgcagggacatggatgaagctggaaaccattattctcaacaaactaacacaggagtagaaagtcaaacacgcatgttctcactcataagtgggagttgaacaatgaaaatacatggacacagggaggggaacctcacacactgaggcctgtcgaaggagtgggggtaaaggagagggagagcattaggacaaatacctaatgtagatgacgggttgatgggtgcagcaaaccaccatggtatgtgtatacctatgtaacaaacctgcacattctgtgcacgtatcccagaaattaaactatatatatagaaaaagaatacatcagagcttgttatcaagataatgtaaaagaaagtatgggcaaatgaagagtctgctacatacctcagtgttaccttattcaatggcatcctgacacttttcaacaaagccttcgatgataggttttaattgagcattccaactccaggaataatgttagggaattttaatacaagtcatctacccataagtgttcagcatgttcacaggatttttcttgaatattccaatgtctacaagcacagtaagtagcaaactggaaatgtgtgctgatttactttgagcaaaaagaaaagacaaagttttctccatatagcgatatcatgcttcaaaagaaaacacattattctgattcttaaatcactgctatttctaccagcacatcatgctttccagtattacaacaatgattttccttacacggttataaatattagaaatttatcatatactttgcattgttgaataaacaatgataaaaactcttcacattatttcagctcttctcttacagtttacagatgtttttaaacaaatacagagttgtagaaatagatgatagatagatagatagacagaaagatagatatataattctatatataactactcctacccttatttatttctactttcattcaggaaagaaaactgagaaaactcaataatccattttgtaatgagatggtattttataccaggacaactatatcagtcactcactggctctatgctcttttgcattctggtctagccagcataccattcccagacaaatatttccaaaactcggctttcattgcttaaccacctgatgaagaacctgtaatgaactcttaattcctatcacatcctgtgcacatacaatcagcctgagttcaggtctctgtatacatattacagccacaagcatctcactattctagaacgaacagcactcttcctaaaaggatgactccttcttggccttctccctttacttgttatatttatttccagttctgttattttgcttttactgccaccccaaaccggggtgctctgtttttgattttgagctatttaaataaaactattattaatgactcatcttttccatgaagacttctctgagttttcctggaaacaggtgagagtagccatctctctagagtgtagccttctcttacagttgatcatttcatcattggctaagtttctcatgatgatcagttttttctttcccaatttataatcacctattggtaagaacatgtccagctaatgattatgtgtttttttgggtgcctgctactggctctagcaattaggaggacctctatatgcattttgttttaataaagatctgacttatttaagaaagaaattaataagaatctctctctctttttcactttttctgtctcttaatgaattgcatacattttggggtcaggccgacaaaagctactcatgtagtttcagattagttactgactaattactgaaaccctttaagcttgtttccccttatagacaatagaatagaatctactcatggtttatctaaggagtattaatatagtatatgtgaggtcattagcattattcctggcatatagtaagtacttaatggtattttttccaattaaggagagagaatcagtctagtgattaagagaacaaaacctaagaaacacacaaacctggcttcaaattctagctctattatttattaatttgctaagttctcttaaacttagattacttatttttctcatttccaaaattggtgatacttatttttctcatttccaaaagctgaataatattttctgtaaaactttgggaagattaaataggtaataaagatgtgatccatatgtcaacaaacatgatgtgtgtgcactgtgatcactaaaaaaaaatctaatggaatagtgggagaggatataaccatctcctgtccctggagggaaactcaggcagcttccctggcttttcctcttattattagttaaaaaggaaaggaaacctaactattattttacactgaaaacacacacttgattcagtcatcagaatgttcagttaaatttaatagtgaaaaccctaaatctgactgaacatgcatgtcacccctcaaccagatggtatctgtttcaggctgggacttacaatggtgcaagggctctgctctttctctttacctgctcacagtgtctcccagtcctcatctgcacttctggagtaaagtcggggagagcatgaagagaaattgcctgcgtggcttcatgccttctggttttagcacatagctaaagctggcagttcttggtggaagagccttgcagatgattacagatgatctcaggattgctgctacagactgtttgtacattaccaaaattctatgcagaatcctaatcccccatgtgtttgtatttgagatggggcctttgggaggtaattaggttaagatgaggtcatgagggtagaggtcccatgatgggattaggatccttataaagggacgaagagctcagagctttctctccaccctgtgaggaggtagtgtgaagacaattatctgcaaaccagagaacgagccctcaccaaaagcctgaagatgctggcaccctgatctttaacttacagcccccagaactgtgagaaataatcctttgttgtttaagctccccagtctatgacagcttgttatagtagcctgaactgactaggacagttgcttcaggaaactctttgaatgttctctttagccaatgtctctggatcccagacagatccatctctattccaggatctcaagattcttgcctcaactcctacccacaggctgaacatttttcccctggggtctccttatgtcttcagcagccccaagatagaccttggaagacctgagataattctataccaatgctctcttccagatggcccatagctgacttatgcattatccctcgttccattaaactagatcacctccttttgatttccctattttagccctactcttagctctagactttccaagtataagttagatctaagccatagtccatgatagctttctcagtcatgactatcagtaatttacaccccccttaagttcttatctttcatataaaagggaggaggaattgggagataccttcacactttttttctctctaaaccttttcttaaacccttgatctgactgaagattctaacatcctgacatctgtcctgatatcgatcctgtcctacctcagtcaaaattgaggaggaagttatccttctaatatcttattagtatttacaacacatagagaaaggctcaacatgaggactggctacataatttgctgggtccagtgcagaatgaatattcaggtcctcttgctcacaaattactaagaattccaatgacagtagccgagcgttaagctgctcgttgcagcatggaatcctgatggcccaggttacatgcccatggagtaggctctagaaaacagatggtagaagtactcattgttgttagtccatcgttgttagtcccttggcccacctcccacatgataccacttctctccgatgtgcctgagtgacctcagcagcactgagattcttactaataatccattaccaaagactccactgtggctcatttgtgcatggttcataactgatttcacgctgaaacaaaaaccggtcaatttagatctgagcagattttccccaaattaactggccacttccccgataatgaaatagggcctcattaatatcctttgtaatttttttttccaatttcattcagttgaagaaagcaaaaatatctagaaaaatgtgtaaagactactacgtgtaccagtagcctctttattttagctttgaaaaaaaaaatactcaagtaataagacaaaaacagagtcttatagtcaggaagtttgaggatgaaagtacaatgtgcaattcatcaaatatctaatgcgtgtcattatttccattaaggtattttgtgttgggagaaaataagacagttctcggaaaagggaggtttgtttttctaattcaatggcacagaatctaacatccctgagctaaggttcagcaggagctcatagagtcagcgttgagatgcagacactgcagatatcatccatctctctgacacacgcagggcctcattgtgtggctgccagacacagtccgctgagatgagaacgtcacagaatacagaaaaggaagcaacgctattgggctcattattgctcttatctatgaatagctccataaaaagcagctctggagaacattgttctgagatgaagaaatggaggtttggtccatggccatcacgattaacatagacagtcaaggagttaagtggacagtgcatggggaatgtgggaactctacatgttagccagggagtgaggggactatatctttttcagagcaatatttttggtgcaggagctgactcatcagattagcagcctctcaagattgatgatgtttctgccttgcctattcctctaattctaaaccaaaagtgataaagagtacccaatacagaagacatcactcagtcatcactgagaaaagccattaaaatggcagtgtgtgcatagagttgggcagagtacaggtagagaaacacccagttacagttcatgcctgagccttcctcagtgtttaaaaaagaaaacagcaaagagaagattgtcacaagtaatctggaacaggcagaccctataaggacgaagggctttgtctagataaacataacaaaacagggtagcatacggtcatttatgttctatgacaaagaagaggtttgggtcagttccaaatgagaaacttttggggtgaggtcaaatgcacaccttattgtcttttactgccatatatgagaattacctggtttagtgtaacactttgggatgcataatttgacccatgaccttgaaatctgcataaaatagattattcttgaaaggatctcatgccataaaagatccacacctctcatccaccgccccacccccactgccttttgttttaaacagaacttcttttaggaaagtagacaattagtgcaaaatctatcagaaggcgtctcaacctgtcctgcagtctccagccaggaactccctggaaggaggccatgtaactcattatttgttaggccatggcctattttttccaggctgttgtataaggcaaatccattgcctcatttctcatagcctctctacaaaagaaaaaagcagacagatcttcccaaactcagacagaatattgtgcacagccaagtgggctgaaaaaacatgctgccaaattggctagcatagctccatgtattgctctctttccagagtttcagcaacaacaacagagatgctgaccccaaataaatgcaagagaagactcatatgcttctatttggacagaaccaggactctaaaaagcatgcaagagatatttccaccaagcctcggtgctcctcagaagtatcacagggaagtctggtaactaacatttaaaaaataaataaatctgagccagaaaaagttcgtgtaagatagataaatactaaaatgggccaaaccatcaccacatatgggacaagtcaattacacacacagatgggtcctaggtcaagtcctgctgttaaagcattatcaacattccctacaagcatgttataatcttcgtaatcctaataaataattaataatagctatcatttattgagtgtttgctaagtttccggctctgtgataaggactttacatgacctaattctgaccacaactctgatatcattccaacttacagatgagaatatggaagttcagaggagttcagacacttgttccagctgatctcagaacaggctgattctaatgtcttttgctactaccttgcttccaacatcattcagttgcctttaaaataaacaacttctggcttttcactcgcgttgttttcaccagcacttaccacgtgtagagcaatgaacatctatgacaaataatattgatatcacttttgcccttagagaattaaaaaaaaaaatctctgagattattgacagtaaggaaagaatagaaacagaatgtctacaggtcagatatttctctcgtcctagtggtactcctttcctatcccagcagttgattctctctctctctctctctctcactcccctttctctctctcatttgtttgatcacagcagtccttatggccatgcaacacaatgtgaaggccgactcccatctgccctcttttctcatagaccaatagagaggcattcagattgtaaggaccacattcccagaagctgcagggcctctggtggtggtcaggagattggaaactctatggcctcaaaacacttcatcaagccattcagccagtggcatttcacataatgctacatgattaaagaccatgaaggttaaacattctaaccagacacatatgtctagcaagggtcttttgaaaacccccattctgaggaaccatctggacattccaggtgatctccatgcctactgatgggagtttactccatcatacataattgtttgggcaatccagcagagagtgtatttgatggccccttttgttttagcttctttaagaagagagccaaagattgacttcactttcatcaaaagaatattaagttacacataaagaatgtcctggctcttaaagggtgttagaatttagaacttgttcctgagcagtgtaaagattcagattccaactgagattctgaagactgagaaagagaactcagagagtggatgctgaaattacagaggagtaagttttagctgcactcatggaagaattttccaacagcaagtacaatgcatgatttgaatagattctctggctttcaggaaccaagatattcataaaatcagagagccaggtgagatgttagtagttatctctctagcacactcctttatctgaagaggaaaagggtccgaaggctggcaacgtgaagattgggccccagactctcagacttctgacacaggatagagcattttcctcaaaacgggctggatatgttaaaacagtgacttgataaataaccgtttggaagggtgcggttatgattcaatgtttagatgggagaaagggggtcaagtgttatttttaattctaatagcttaagatattatggctaactactcaggataattagtataagcctgctaagtgacaatatactagataacctgaagatcccttcctcatcctgaatatatatggaaagaggcatcatctttgataaagaaaaatcattcaggatacattcgataaaaaacatcatttcacatgagcaaacttttggtagtgatgaatatgttcaatatcttgattgtgctgatggtgtcagagagaaatccataggtcaaaacatcacattatatgctttaaatacatacagtgtttaaatgtcagttatccctcaatagagtagttaaaaatgttttaaaaaatcacttccgtagaatgccacatataaaacacagtttatatgcttatatgtagacgtgtgtgttactgcacaaaattgtgaaatacagaagcaaaaaacaatgccatccagatcattttattagattatctaaataaacattgtactaatatcagtactcttttcacctcccttttaggaagtaattttttaacatattttttgtcttttgccctgtggtataaggtcttccaaaggatatttaatttgattggaaactgactgatttatgaaacgcaaaatggtcttttataaaaagtctctggaacgtgaatgctttacagcagaccacagctctcatttatttcatatttgaagtttgggaccttcagaatatatttgactctggagatccacactattttgtgatgtacaattttgctcaatcataaagacaagggtcactttgcaaaaaagagtcacttaagaggataaatgagattgtgtaataaacacattgccatgattcagttgaattcatccaagagtttttgaaattctattctttggcattatcagctaatcagtatttctcattaagcctctgaaggaccacttacaattcagtattgcttgatttcattttatatgaacatttatatgtcacattggcagtcatgaatttgagatttcttgaacaaatacaaacttagcccttgtggaaatccgaggtctgatattaattttgtgataataaaagaaggaagaatttaggattaaagagcataatcttgtcaaggtttttggcacttcattcaaacatacataccacatttttactaccctttccttgaaaagttatgtgtatgactctgtatacagattgtgaatggatgacaaaatattgccagtgattccagtatttactagagttaaactctccctgacatagaataatactgaataaacctaacatgtgatttgtcaatttctacttaaatttctttctcttcatatgctgtatctacttgattttgcctacctttttgtttgcataaactgaatataacactctccacaaattagttatcattggatattacattcactatattttttaaaaatcttgattttcctagccctggtcagatttaaccataatcgaaagaggatctaacctaaccctgataagaaacactgaatcagacggagagagaaggcccagagtcatagatttggatcctgaaacactggatctaaactgttttgcactctactcctgatttggtttttttgtttgtttgtttcttcgtttgttttttcctaaccactgttggttgtcaatatcatcaacatctccatttatagtgtcctttgtcctgccagttcggccaaggagcccattctcttgattcttagttcccttccctgcctccattttactacacaatgtccagagaggtgcgggttacctcaagtttaaaacaaataaaagtcagatcataccctcctatgtcttccctactgagaagtaggacctagaccaagactatttgatattttagggtccattcaaaacacagtctaaagctccaggatttctgtagccaccgaagaggtttactctgtgacaaatatagaagctacggcagttaattctacggttttatgattttaaggagaaaatagtcatcattatttaatttctataaggacataatttgtgttagcaacgtgttttaatgcatttgattgtgcttgtttcttctgttattgctttcttccttttgttatgtattagcttgaggagagtaaggattaaatgatttagagagtttcttgtcatatgtttaatatcagatggcattatacctgactagagctataccctggttgttagttaactagtgatccaaaggatgttgacaacagactttttcccaattggctttttgcttttaaagtaaaagaacaatttaaaataaaacaaattaactttgttccagtttttgatatttcaaataataattatatagacgaggactcagaatggttaatttaattgaaatgtctaagcccaaggctactagaccttaaaaaagtggatagcttatgcagatacacagataatggtttaataatatgcattatctccttcgaagttggtacacttgcataaacaatggctcaaaagctatcagccaaaccgaaagtgtactggtgtagaaagtgctgaatgcttccattatgcattattttagccgaggtaatgaatattgtatgatcctttaatgttgaggtagtttgtactattttggtgtctgttattcttagaggaaccttaagtaatgtaatggagctaagcttaaatgctattttgctgtttaggtcattattgttccttttttgtctgcactttggattatataaaatcctgaaaaggcaagaagacactttaaagatgcgacagaatcaatgctaattttaaagtaaatctttcccaggagaaacacaaagcattttcacttatgatttctaaatagagtataggtgcctgaaaaatggccaaatatttaattcctggaaaaggcatcataaataaacatcattataatcatgaattagatgagggaatttaggggattataagattaggtgactgcctagaactaaatatatgtatatgtgtgtatatatttatatgtatatgtgtatatatatgtatatgtgtatatatatacacccatatatacatatacactgtatatgtatatatatacatatacatatgtatgtgtatatatgtatatatatacatatacagtatatgtatacatatacagtatatatgtgtatatatacatatacagtgtatatatgtatatatatacatatatacagtgtatatgtatatatatacatatatacagtgtatatgtatatatacatatatatactgtatatgtatatatacacatatatacacatacatatatacatatatacgtatatatatacatatatacttatatatgtatatatatacgtatatatgtatatatgtatatatatatatgaaatataaaaagggaagggaattagacattgagtacccaatatgtactaggaagtgacgtaaatgtttcataaatgagacttcatttcgaccctcctccacgtgttatgttttccaagcattaaaactttacagtattcaaagctactgttatcacgtcagttcaaccaaaaggacagtttcccagtcatacctgaatatagtcagctaccttccctattgatatagtttgaatatttgtcccctctcaaatctcatgttgaaatacagttcccaatgttggaggtggggcctggtaggaagtgtttgggttatggggacagatccctcgtggcttggtaccgtccttgcgattatgagtgagctatttaaaagtgtgaagcaggtggctccttcgcacaatggatagtgcagtggacttctaaaagtgttatgcgcctcctcgtctccttgttcctgtgcccaccgtgtgatgtccctgcttccgctttgccttccgccatcattgtaagctttctgaagccctcaaccagaagcaaatgccagcatcatacttcttatacagcctgcagaaccgtaagccaatgaaacctctttcctttataagttacccagtctcaggtgattctgtatagcaatgcaagaacagcccaatacacctactaatcagacaaaagcactcaagtagcaattatttgtacttgtttctgtgactctctagggagcctaaagtcctctgaggcttactaagcttggaaatgagtccactgacatatgttccagatattcagaagtctccttctttctctctccatctccaatccacagtggttctttcccccactgtcttattttgtcactgccacatctatcaatagctgtgcacacaatattcacttcggttaattatttccttcattaattggttccttttattatcgaattgtaataacaatgtttattcaggagtttcatctttgaagatagtggattagagtctatacagtcaccttcttcctaacacagctaattggtcttgctacacatgattaaactctttctccacatgattgttttatgtagtgatcattctttcctaatctgattttctacattttctagaactggtttgcttattcacttttaccaagtgaataaagaagaagcagatgaattgatatctacattttaaattccttatttacacagaagcagatgaatttatatctacattttatagacagctataaatatttggggttttttttgtttttgtttttgtttttgtttttttgagacggagtctcgctcactcacccaggctggagtgcagtggcaccaacttggctcactgcaagctccgcctgccgggttcacgccattctcctacctcaccttctgagtagctgggactacaggagcccgccaccacgcccggccaatttttgtatttttaatagagacggggtttcaccgtgttagccaggatggtctcgatctcctgatctcgtgatccgcccgcctcggcctcccaagacagctataaatacaatcttataaaagaatacctttatagttcaacagtcctactaattttgaaattaataaaatgaatacacatttcattttgttaatgttttctttgtattacaactacatttcatatgctttatgttaagccaattactatttggttctaactattgagtcaaaactttgaaaaaattattcattttcttttggctgaaatcaaacttttggtacccaacttgtcaccattagatctctactatgtttagaaatttactttagactcatttctttttctgatctctaaaaaatgtctctattgctttcaggggactgttatacaatggcccaatatcttggggctaaattgacaggaagataaatctagaagcaatgttcatttggtgacagtttttaaagtaatgaactgtactttctctagtcacttgctttctttttcttaatgagattttaaaattcattctcatgttctttttgatctcagtgattttctctttccacccccccatgctgcatattgtcactctaagccatgtgttttaatgacagttttccctaaagatctagaaattttttatttttttattgtaagattatattttatttaactaaatcataaaggaacttgtatggttcattagtcatcctcctcccctttccctgtttcttatcccactctggctttggggaaaagtaatatgctaataaggattataattacataagaatgcatacgtagagtatgctactgttgagtaatgcctacatattatttcttttaggctggtggctaaagccacatagagtgattcctaggtttaaacgtccagatatatctactagttagttattttagtagtgactagctccctgaaaaaaatacttccagccacttcccattgcaaagtagcagactgaatacaaataaacttatttctgtaaatcagattctctatttctttcatattttgcttttcctgttattgttattattattttatcataggcatctccagtgttgaattttacttcttcagaggagcttctatgtatgcacacagatatttaatacctgttttgaataatcttatcaagctaaagtgcaataaatttagtcctaagaataatcagaaagaaacatgtcagacaattggatagcatccaccttgagatcatatagcagaatgttttatacactctgtaaaaagtttacaacattgcttgcaattttaaataccaatatacaaaagatccaagcacatgagctataacttattcaaattttaacaccatggttacattgcactttgctattccttcatatcattccaaacaatcttcacacatttaacaaggtcttgaatttttttgattcaactaaagcaaatccaggaaatttagaaagttacagttagtttggtttgattacaaacatctgccatggcatgaattagatacagcttacctatgccttcacgttagcaccccatggtagctgcattgccccattaacaatcagatgaaactcaatcatcttgaaatatttttaaagttttggttttatattttagtatgagtaagccaactgcatattttttatataacttgacactttaagcttagcaaaagttctgtttggggaaatgttgccatgtaaggaaactcccgtttttactttacctattaaatttttattaaggtgttgtcagttccagttcagttaaataactttatttttaataaaagcttacattattgaaattcagagttagtcatgtaaaatatattgctctgtattagttttactccagtcataaaatattcacagtcaccctgagaaatgtgttctttgatcccctagagagagataaagaaagtgaggcttagagaagttcagtaacgagccaggcaacaacaactgccatggggcatactaggatttgattctaggccattctgactccaaagacatacgtccaggttaaatgcaattaatatctctgttctcgtctactttttcacctctgagtgaattagtcaccatatgaaaacttctccaatgtactgtcatctgtagagatttctctgttgtaaaatgtattgaggggatggattcttctagtttcttttgctgctcccataacttcaaagcctaggtatgctttgctacttaatcaaaatgcctagtgatgccactaatactaaatttccctagtatatatagaataagttaaatgctatctaaccactatgtcaatttcaataggacaattccaggcctatctactgttactctctactcttttttttttttttttttttaagcgaagacagctaaagttgaattaaataaagggcactgttttcttttctcctagttcatgaatgtgtccttgatttgtaaaaggaggtaaaatatcaccagaaacctaaaagaagaaagtcagctgcctgcctattgaagatggatatagctgactcatttggaagcttactaggaggatttttttaaaaaacaattctataaattagattggtgacaatcttggctgcaggtgttatcttggtactttccagatgcttttgttagaaggcaagcagggatttacagtgacggagtgccctatatctgtctttcatgggggacatttggagaaaaaacctgttagcacttgttggttaggagtcaccacagagctttcagctgtggtttctaactaaggatacatcagcaagatgccagctatttggttcctggaaaatgtttcaatgttttcattctgccattgacatatagatttgaaatttattatttgtgagccataggaaagaattgcattttctaactgcccagatataattaaaacccaaaccttatccagaaaaagtaactgagactttcttagccaatgaattatttcaacagttggccattgagggaacaggacaatgtttaacccataatcatgctttgaaatttgccaactgccctgtccctttgatcactctaaaaagaaatatgttcttgtctttttgaaagagaaccagatacaatgtgctttggctgcagtccctgtgcttggtcaccagatttataaatgaagttgtttaaaacgcaaataaataaaggaaaggggaaaaagatgttggaaatttagaaaagagtacctgaaaaagaaaaaaaaaagtttcttatgaataagtactataagaaaaagactcacgatatactatatttgtgactcaaagaagttatttcacagaaatattacatgtgatgttcttttgtgccaacaagaaagaaattgaccacagttgttcaaggaaacactttatttttttttttggttcaaaaaattaaactaataagagataattggaaggaaattttgacatttgctcatatttccagagatactaaactgaaaatgctgtttggaagagcatcagaggatgcttaagagcaacagagtgttttctcagtggaatacaatacacagacatagacattgtgaagaatctctttgatttgaaatctcactttctggatgaaatgtcctaaaaaatctctagtttaaccccttggtactagctcttcatggaaaaaatatttaaaacatttgaaagcattattttagaataatttattttttcctcacacatttaaaaagcttacaaggtgaaattagttaaactttaaaagtgggaacaacattgaagcatatataagggcttaaagtagcatgaagcagcctggaagctaaccattaaacatttaatgtctctgtagctttcatttattttcttccatttttctctgacccttgtctggatgcgtttctgtgccgttcttccaatgcatatttaaaatatagctctattgaccttggaagctgagaggaaaatctatagtattactggcaaaagatgtgattaactaaactagttatcaatgcactccccccacactaaggatttgggagagattgttccagatgtaaaaaaaatggcagggctaaatgattacattcttgggttatatcagtgggttccattaaacatgtttagtttgagcgtaggggaatgataacctactgttactaaagaacagtcagaagtttcaaggcagttctaagaaaagcatattttctgttaggtagctatttcttggtagctattgctacttaacaaatgaccccaaaactttgcatcttaaaacaacaagcatgtataatacctcacagtctggaagtcaagaatatagtgactcagttgggcaattcttctgatacctatggtgttgactaagaccaccaggtgctattcacctggcatatgggcttgtttggagggcccaagacagcttcactcgcatatctgatgtcttgattgggatgactgcagcactgggtattgctgggactcttaactagagcacctatctgtggcctctccataattgtgctttcagcatactcagatttcttgcatggtaacttagagtttgcaaagagaatcttctaagaaacaaagctggaagcttctggtttcttaagtcctgagcccccaaattggcacactatcatttctaccatattcagttttccaaagcgtattcaagaagagaggacactgcttccacttcttaactggaggcatttcaaaaaatttgtagttgtctttactttgtcatgcttgtgattactaaaatgaagtgaaaatatctatatattcttagctatctggtatagagacataagttatgagatctgttattgaacagatatacttttttaaacacattactatttccataataaccaagtacaatgagtggactttatttggatcctgagttgaataaaccaactgtaaaaataaatttagataagagaggaaatctgaatatggagtaggtattgtatattgcctggatgttcaattttcttaagtgagataatgtcaatgtggttgtgtaagaaaatattcctattgatatttcaaagaaatatactgaaatatttagaaattaaatgactattttgggaatttgttttaaaaaacttcaccagggaaagtgggtagatagacaaaatgagtatgccatagcattgattattgatgtcaatgatgggtgtatagggtttattgtactctctacccttgattgtgtttatacattttccaataaagaataacgaaatgttctgttgttttattagtgtatatgttttataatttctactgattcagaatcagttgcttattggggagatattttaaaagtcatagcacatttctgaatataaagttattgttgagtcatttttaaattattatgcataggttgtctcagggtataattccaattctacctactaacggatacccctgaatccgttcttagcagcatatttgtattagctttcatcaataacatagcgtaattttcttcataggtattcatgtcttccatcacatgtatttcttgaatgcctgctatgtgtcagacacgtgctatgaggtagaaatagagttttgaacaatatcaatgaaacagacctacttattacctttaatgagttcacaatatagaaaaatagacaaaatttaaaaaaccctcaacaataaattagcattatcacaaactttgatatgtgctttctaggaaaaatcacattcttttgagagtaaggggacctgaccttacctaggtagttactaagacttgacataaaacgtaataattaattcaaatccaaaaaaaggaataggcgtcaattaaaggaggaaaggaagggtgggtatatttcaggcagagagaagactgtgtgtaaggaaattgtgaatgaaggaagcacagtatgtctacaaaataaacttaaacaagggatttggggctagagtgctgaaagcctggggattgagaagcccaaagtgtagtctggagctaggtatatagagttttgtagttcatagtggagttttctttctttccttccttccttctttccttccttccttccttccttccttccttccttccttttccttcctccagggtggattcagggtgagacatggagacagtttaagaggtaaactcaacaaaatttggtgatgggttaaatatgaaaaatgaaagggcctgaaaattaagtgcttcctgttcacaaataaccattatctcttgctttaataacattcactttaacctaaaaacatttaagtataccaagcacggttctaaatgctttataaatactttcctggccaggcacagtggctcacatctataatctcagcactttgggaggccgaggcaggtggatcacctgaggtcaggagttcgacaccagcctgggcaacatggtgaaacccttctctactaaaaatacaaaattaggcaggcatgatggcgcatacctgtaatcccagctactcgagaggctgaggcaggagaatcgcttgaacctgagaggcggaggttgcagtgagccgagatcacgctgttacactccagccagggcaacaagagtgaaactctgccaaaaacaaaacaaaacaaaaccaaaacaaacaaacttttcctacaaatatatggggttatgcacattttccatatgaaggatttaggacctagtacacagagaagcaaaaataacttgctcgcgatcacacagttgttaagtggtagaacggggacttgaacccaagaagtctgtcccaagggtctataattttagccccaaaccatgctagaccattcaggttcatggccaaccacctagatattacatttctcagattacaacttctttgcagttgatgtgttcttgtgactaattctggccagtggtatgtgagcagtaatatgtgccactgcttggatcatatgttttattccctgccttttccccttttccactaagagatgatgagcagtggagcagctgccttaaacccagaagtggacgttgtgtgctgaaggtagcagggctggctgctccaacaacctgaaaccacttatttagaaacaatgtaaaaaagatatgtgcttttgtgttatttatttaacctataccaaattagggactatttgttacagcatattaaactcttccctacttaaagtatgaaactgtcatagaatacttctctttttttggagtacagaaatggaggcatgagggggccattcactaggaagaggaaatgcagaagagggagagtttgggaaacaatcgtggagttagttataaacgagataagttgagatgactttaaagcactcaggtagcgatgtatatatgggtatgcagctgaataaaaagagatacagctgaagccataagtaaactctttcattattacagttttaataccagcttcacagcaaatgaaaaaatatacgttgttctgaaatagcttgtaataatatcaagtgctaaaggataggttctcccctgaattttattaacttccaacatttatctaaaaatacattttaagattatgaatgtttgaaatagattatcccattttattttatatttgtgaataaacacttgtttctaaaaagctagcctttgaaaagctagtttagaaatttatgtcagaagaaattataacaaactatctctcagaccacggtgcaatcaaactagaactcaggattaagaaactcactcaaatccgctcaactacatggaaactgaacaacctgctcctgaatgactactgggtacataacgaaatgaaggcagaaataaagatgttctttgaaatcaacgagaacaaagacacaacataccagaatctctgggacacgttcaaagcagtgtgttgggggaaatttatagcactaaatgcccacaagagaaagcaggaaagatccagaattgtcaccctaacatcacaattaaaagaactagaaaagcaagagcaaacacattcaaaagctagcagaaggcaagagataactaaaatcagagcagaactgaaggaaatagagaccaaaaaacccttcaaaaaattaatccaggagctggttttttgaaaggatcaataaaattgatagaccgctagcaagactaataaagaaaaaaagagagaagaatcaaatagacgcaataaaaaatgataaaggggatatcaccactgatcccacagaaatacaaactaccatcagagaatagtacaaacacctctgcgcaaataaactagaaaatctagaagaaatggataaattcctcaacacatacactctcccaagactaaaccaggaagaagttgaatctctgaatagaccaataacaggatctgaaattgtggcaataatcaatagtttaccaaccaaaaagagtccaggaccagatggactcacagccgaattctaccagaggtacaaggaggaactggtaccattccttctgaaactattccaatccatagaaaaagagggaatcctccctaactcattttatgaggccagcatcatcctgataccaaagctgggcagagacacaaccaaaaaagagaattttagaccaatatccttgatgaacattgatgcaaaaatcctcaacaaaatactggcaaaccaaatccagcagcacatcaaaaagtttatgcaccatgatcaagtgggcttcatccctgggatgcaaggctggttcaatatacgcaaatcaataaatgtaatccagcatagaaacagaaccaaagacaaaaaccacatgattatctcaatagatgcagaaaaggcctttgacaaaattcaacaacccttcaggctaaaaactctcaataaattaggtattgatgggatgtatctcaaaataataagagctatctatgacaaacccacagccaatatcatactgaatgggcaaaaactagaagcattccctttgaaaactggcacaacacagggatgccctctcttaccactcttattcaacatagtgttggaagttctggccagggcaattaggcaggagaaggaaataaagggtattcaattaggaaaagaggaagtcaaattgtccctgtttgcagacaacatgattgtatatctagaaaaccccattgtctcaggccaaaatctccttaagctgataagcaacttcagcagtctcaggatacaaaatcaatgtacaaaaatcacaagcattcttatacaccaataacagacaaacagagagccaaatcatgagtgaactcccattcacaattgcttcaaagagaataaaatacttaggaatccaacttacaagggatgtgaaggacctcttcaaggagaactacaaaccactgctcaatgaaataaaagaggatacaaacaaatggaagaacattccatgctcatgggtaggaagaatcaatatcgtgaaaatggccatactgcccaagatgatttatagattcaatgccatccccatcaagctaccaatcactttcttcacagaattggaaaaaactactttaaagttcatatggagccaaaaaagagcctgcatcgccaagtcaatcctaagccaaaagaacaaaggtggaggcatcacgctacctgagttcaaactatactacaaggctacagtaaccaaaacagcatggtactggtaccaaaacagagatatagatcaatggaacagaacagagctctcagaaataacaccgcatatctacaactatctgatctttgacaaacctgagaaaaacaggaaatggggaaaggattccctatttaataaatggtgctgggaaaactgcctagccatatgtagaaagctgaaactggatcccttccttacaccttatacaaaaattaattcaagatggattaaagacttaaacattagacctaaaaccataaaaaccctcgaagaaaacctaggcattaccatgcaggacataggcatgggcaaggacttcatgtctaaaacaccaaaagcaatggaaacaaaagacaaaattgacaaatgggatctaattgaactcaagagcttctgcacagcaaaagaaactaccatcagagtgaacaggcaacctacaaaatgggagaaaattttcacaacctactcatctgacaaagggctaatatccagaatctacaatgaactcaaacaaatttacaagaaaaaaacaaacaaccccatcaaaaagtgggcaaaggatatgaacagacacttctcaaaagaagacatttatgcagccaaaagacacatgaaaaaatgctcatcatcactggccatcagagaaatgcaaatcaaaaccacaatgaaataccatctcacaccagttagaatggtgatcattaaaaagtcaggaaacaacaggtgctggagaggatgtggagaaataggaacacttttgcactgttggtgggactgtaaactagttcaaccattgtggaagtcagtatggggattcctctgggatctagaactagaaataccatttgagccagccatcccattactgggtatatacccaaaggactataaatcatgctgctataaagacacatgcacacgtatgtttattgcggcactattcacaatagcaaagacttggaaccaacccaaatgtccaacaatgatagactggattaagaaaatgtggcacatatacaccatggaatactatgcagccataaaaaatgatgagttcatgtcctttgtagggacatggatgaaattggaaaccatcattctcaataaactatcgcaaggacaaaaaaccaaacactgcatgttctcactcatagatgggaattgaacaatgagaacacatggacacaggaaggggaccatcacacagcagggcctgttgtggggtggggggaggggggagggatagcattaggagatatacctaatgctaaatgacgagttaatgggtgcagcacaccagcatggcacatgtatacatatgtaactaacctgcacattgtgcacatgtaccctaaaacttaaagtataataataaaaaaaagaatggcaaatatgcacataaaaaaaagaaatttatgtcagaagaattccctgatttagtgagattaggttattggtaattatattagttatctactgatgcataacaaattactcccaaaatgtagtgagtttaaacaaggaacatttgttatctcatagtttgcatggcccaggaatctgggcacaacttaaatgggagcctgaggctcaaagtctatcaggaggttgtcagcaagctgcaggtcacatctcaaaactcaactggggctcaaagatctgtttccaagctctttgagtggtaatcagacagctttagttccttgaagcctgttgaattgaggcacttattattcactatgctacagggggctttccacagggctgctaacgacatggcagcttgcttcccccagcatgagtaatgagagaaagagacactgcagaaggaaggtacagcctccttaaaatcgtatcatggacgtgccatcccatcacctctgcagtattctagtcattaaaaatgaatctgtaagctcagcccactcaaggggagattatataaggatcagaatatctgcggcagaaattattggaggccattttagaggctgactaccacagtaatcaataatgatcctaatgaaccaagaagaaattcagacctggcatggtggcttattcctataatcctaacacctcagaaggtcaaggcaggagaaattgcttgagcacaagagcatgagatcagtctgggccacatggaaagaccctgtctctataaaaaataaaaataaaaaaattagctgggcctggtggcatgcacctatggtggtctcagctactcaaaaggttgaggtgggaggatcactttagcatgagaggttgaggctgcagtgagccatgatcataccactgcactccagcctgggtgatggagtaagatcctgtctcaaaaaaaaaaataaagaaaaaaaattcaaaacctcaatgtatgaataacaagtaacgagatcaaagccgtaataaaaagtctcccagcaaagaaaagccaaagaccttatggcttcactgttgaattttgccaaacatttaaagaagaactaatacccatcctactcaaaagtattccaaacaagagaggaggagggcatacttccaaactcattctgtaagaccagtgttaacctgataccaaaaccagacaaagatacatcgaaaaaataaaaccacaggccagtatccctgatgaacatggatacataaatcctcaacaaaataaatagcaaaccaaattcaataacacattaaaaagatcatttgtcctgacctagtgagatttatccctgggatgcaaggaagtttcaacattcacaaatcaatcgatacgatgcatcatattaacagaatgaaggacaaaaaccatatgatcattttcattgttgccaaaaaaagcatttgataaaattcaacatcctttcatgataaaaaccctcaaaacactggatacagaaggaacatacctcaacacaataaaagccacatgtgacagacccacagctagtattgtactgaatggagaaaaacaaagcctttcctctaagatctggaacatgacaagattctccactctcaccactgttattcagcataatactactggaagtcctagctagagaaatcaaacaagagaaataaataaaggacatccaaattggaaaggaagaagtcaaattatctctgtttgcagatgatataatcttatatttaaaaaaacgaaaagactccaccaaaaaatattagaattgataaacaaattcataaagttgcagtatacaaaatcgacatacaaaattcagtagcatttttatatgccaacagcaaacattttaaaaaagaaatcaagaaggtattcctatttacaacaactacaaaaaaattaaatacctaggaattaactaaaaaggtgaaagatctctataatgaaaactataaaacactgataaaagaacttgaagaggacaccaaaaaaatggaaagatattccatgttcatgttgatggattggaagaatcaatgttgttaaaatctccacattacctaaagtaatctactgattcactgcaatacctatcaaaatactaatagtttttcaaggaaatagaaaaagaatatcctaaaatttatatggaaccacaaaagacccaaaatagcctaagctatcctaagcaaaaaaaaaaaaaaaaaaaaaaaaaatggaggaatccctttaccttacctcaaataatactgtggagctatagtaacccaaacagcatggcactggtataaaaacaaacacatacttcaatggatcacaataaattgccgagaaacagatccttacttctacagtaaactcattttcaacaaaggtgccaaaaacatacattggaaaaaggacaatatcttcaataaaaggtgccgggaaaacaatatttttatgcaaaaaaaaattttaccatttacaaaaaatcaaatcaaactgaattaaaaacttaactataaaatctcaaactgtgaaactcctacaaaaaattattggggaaactctctgggacactggactgagcaatgatttcttgagttatattccataagcacaggcgaccaaagcaaaaatggacaaatgggatcacatcaagttaaaaagcttctgcacagcaaagaaaccagtctacaaaatggacagactgcccacagaatgggagaaaatatttacaaattatccatttaacaagggattaattattagaatatataagtggcttaaacaactctatagggaaaaatatttgattttagaatgggcaaaagatgtaaatagacatttctcaaaaaagacatgcaaatggaaaacatatataaaaaggtgctcaacatcattgcttatcagagaaattcaaattaaaactacaatgagatatcatctcacagcagttaaaatggctaatatccaaaagacaggcaataacgaatgccggcaaggatgtagagaaagggaacccatatacactgttgggttggtgggaatgtaaattagtatagccactatggaaaacagtttggaggttcctcaaaaaactaaaaatagaattaccatatgacccagcaatcccgccggtgggtggggattttatacccaaaagaatggaaatcagtacattgaagcgattgcagtcccacatttatcgcagcactactcacaatagccaagatttggaagcaacataagtgcccatcaacatatgaatgaagaaagaaaatacacgtatgcacaatggagtactattcagccaaaaaaaagaatgagatcctatcatttgcagcaacatgggtagaactgaaggttattatatgatgtgaaataagacaggcacagaaagaaaaacttagcatgttctaacttattgtgggagctaaaaattaaaacaattgaactcacagagataagacagcgatggttaccagaggctgggagggtagcagcagggaggggcaagggggaatggttaatgggtacgaaacatagttcgatggagtgaataagatctagtatttgatagcactacagggtgactacagtcagcaataatttaacagacatttaaaaaataacggaaaatataattgaattgtttgtaacacaaagaaaggataaatgcttgagggaatgaacactccatttaccctgatgtgatggttatgcactgtatgcctgtatcaaaatatcttatgtaccccataaatatatatacctactacatatccacaaaaattaaaaaagcatgttcctaataatattaatatagatttatagccttacttcaattctcccagttttcaattttgaacagtttcaatcaatactaaatttaaatatacatacacacatattatggtaagcattttgtagaacacaaatataaaataagtcatgggacatgtcctctaatagtttctgttaaaacatgtgggctacttacttcccaatttgaaactttatattactttttgagctcatgtaaggtatagataggtacagctacagagatatataagataagatatagatataggtatacatgatataggtaagtgtgtgtgtgtgtgtgtgtatatatatatataatatatatatatgcacatatatatattttccacatgacaaaatggggtatgagagagaaaatactacattttttcttacatgaagataaatcaaataatgtcttttgttttgttttgttttgttttgttttggttttgagacgaaatctcactccgtcacccaggctggagggcagtggtgcgatctctgctcactgcaagttccacctctggggttcacgccattctgctacctcagcctcccgagtagctgggaatacaggcgcctgccaccacgccggcctaattttttgtatatttagtagagatggggtttcaccgtgtttgcctggatggtcttgatcccctgacctcgtgatctacccgcctcggccccccaaagtgctgagattacaggcgtgagccaccactcccggcccaaataatgtcttaatatttattgttattagaacatttacagtgtcaaatataaacagttacatcatatttaagaattgatgtttttaatgttcaccaataaacatttttattcttaaaaaatgggaattaaattttttttaatatgaagatgaagaatgtaacacacttttgtgtttcatatatttacagtgaaattcaggcggtgagtaatgataagcctctgcaaagcttcttaaaaaattcattgcagatatgatcccatttgttaagtattaagattaataaaaaagcaattaaattaggataattaacacaaaattcagtattcatgctcagtagggttactctatactggattgtaattgaaaactgacatcttcttagccagcgtactaactaagggcttttattttatcttgagaagattacctatcagtataaatccagagattagaaaactcttcgtaattacacaaattgcctctgtaatatcatgtcagtttgaatgttacacaaagatagagcaacaaggctaaaaaattaaaataaacagccattctactgctggagaaaagtctattaaaaggtcatactctgtcctctactaagaaaatatcaaagagtttcaattctttattgatcaactcatttccatgatgtgaattgctataaactattgacataggtaaaagggaaaagataaatttaaatgttcaaataaatgattatgctactcccatccaaatataaaacatttcctataccattgttttgtttatcctacatatcaaactactgtatatgatgagagagtccataggagcatcttatatatcagcactactgtcaaaatgtatactctatcaacagtcatatttaaaatcattgtcctacaatttaaacaataatcatgtagaaataactgagtaaagtgttaactcattaggtagagttaatggaataggcaaaagattcttgggcaggtagagaatttctcacagcttgtctaagatgagcaaaaaataattgcaccattgtttggatatataatatccaatattcattcatcaagattccagcaaacgttggttaagcttttcttatgcaacagatactgttctaagcactctgtgggatacaaggataaataaaaagatgataatataagaagtgatgcatgaagcacactgcttataatgtcatagaacctaacctcaaatagtgtataatacaacatgagcattatttatttcccacttcgaaactatattactttttggagctcagataagaaactattaagggaatttcccttcataagtcagcatctttctttttcctctgctagaaatcatgcaaaagttgcaatgataataaagacctctctaactgcattttcaggaaaactagaacgcagaattgaagagttaaatataagaaattgcaggaaataatatgagagttataaaattgatcagtggcagcatatttcagaaagcatcagcaaaagtatatttcctgaaggtgagtgtggctcactgtgaattgtgaaattatatctctttttttttgcattaatggaagtgggaactggtctgagcagtgctgatgacaagtctgcccccatccctatccaaagtcatttggatgaagagaacacaggtgagagggttacacaaaactctcccagaagagacattttagcaacaaagcaacaaacaatcgagagatatatttgtcagcagaggaaagaaaatttggactttgaaatctagaagatcctctggaatatctaaccctaaagaaacctcctgcaaatagcttgcccaggaaaatttcaactcattcagtgatgagtaatatgaaagggactggaactgcatccatacactgatagtacacaaaatgaagcacaatgcgcaccacagagtcaaaacattgtcatggtgcctgtgatagttagggacaaatatctcagcatatattgagaaaaacaacctcattaaacaacagccttcatggcgttagactggaaacacaaatagagaactcaggcaagagatgtcgaggaagatgtgagctgagttttgatctgtcttatctcagaaaaaaaaagtagataatatgaatttttgcaaaaatatagggaaagaagaccacaaagaaaaattgttgctataaaaaatatagtgagatggagaatagaaaactaaaatatgaaagaaaaagacaaaaataacttaaaatgttagctatttaaattaggtagtataggcataattggagtccctgttgaaggaagcgaaataagaaaaccaaataatggaaaactatatagaaaggtataatttttaaaaaattcatggacaatcacaaatgaacaaatatggtacgattacacttatgtggaataaaagaatcaaattcatagaaagtaaaatggtggatggtggttgccaggcgctgtggggaagaggaaatgaagagttattgtttagtgggtatggagtttcagtttgggaagatgacaaattcttcagacagatgctactgatgattgcacaacaatgtgaaggtacttaatgtcactgaactgtatactgaaaaaagattaaagtggtaaactttatgttatgtgtattttgccaccaaaaaaaaaattcatgaaagaagaacagacttgacttttcataagaaaaaggatcaccttctggtatagaaaactgacctagagcaggccaagacatagtctatcaaaaatgttggacattaaagatagacaggcaaaatattaagacagttgtaggggggaagcaaataagtctagcctcagatttctctatggaaattgtcaacaccagaagtcagtggaacaacatctaaaagatacttaaggataggaagcatgaacccaggattttgtatgcagacgagcgatactcaagtataaagttacagatcattgttttaaatatgcaagaaactgggaattttattcccaagagaccatcttaagacaaacactagaggaagagacttcagctcattaggaaagattgataaaaacatgacaaaagaactggcagaaaactttgaatatgtttgactgtaaaataaatgtgacaattatggttaagtgagagaaggcaaaggtatattctctgacaatgaagaaataataagagaaaaagtaggaaagagaaggtaggaaaagactgaaagaagaataattttctgattgtctcatcttggagtcaaagaaggtcatttacagttgaccaataaaatacaaatacagagaatatatatttgcaatgttacacatttatattttacctaattgttagaataatgcacaaaatcaggagttaaaaccataactaattttcaagaatctgcggtttggctgaggcagctctgcctcaggaggcaagtctgtggctccaagtcttctttatgtggctgtaactcttttggagatagaaactagctaaccaggcgtgattttatgctgatgatagaggctcaagagaccaagtggaaacacataatgcttcttccctcttaacattgaaatgaccgtcacttttctgagctcacttttttttttttgtaataccttctcatacataaccaaaagcaaccaaaacatgcttctgacattctagaaccatcttgttcaaccttccattctgcctgaaatcacaagatgattggctgcattttataatttttgatctaaagtaagtaaaccttttgctgtctaccttttataaacttttaaccgtgtgagtatagtggctttacaaaaaattaaaaaatactatttagagggagagcatgattttgggaaataaattaaaccattaaacagaatattcgggttttggttcagattcagttactaacttgcttgtgactgtagatgagccacttaatcccctgagcttagttccctcatctgtaaaaatgatggggttggattaggcaatcttcaagtttcttcctcctttaatattcggtgggtctatgatttaatacagtgttcaccaaactgtggcccaggaaaatagctctggagtccagccattattccatctttttatcggcacttccgtcctctgctttcctgaaacacaggaataatgaataactgttttcccaatcctaaaattatataattcaagtcatgtaaaggataaatattaggaaactcaagaaacagcatgctttcaaaggcattcaaaacaaatgatgacaggaaaattccctaaaagacttacattgaaccattgttttatctgttttttgttttgttttgttttgtttgagacagaatctcgctctgccgcccagactgaagtgccgtggtgtgaacttggctcactgcaacctccacttctgggttcaagagattctcctgcctcagcctcccaaatagctaggattacatgcatgtgccaccactactggcatacatatatatatatagtagttttagtagagacggggtttcaccattttggccaggctggtcttgaactcctgacctccagtgatctgcctgcctcagcctcccaaagtgctggattacaggggtgagtcactgcacctggcctgaactgtgattttagacatcatagaaatagtaataaaatcatgaacatattttaacatatgcatttaatataaatctacaaaaattaccttttcttcatgtatagattacaatatggaatttgggtaaaccccaggaaattttctgttcattgtaagattaagctcaattaaagctgagagtgaaatatttcttccccctgttgtctagcaattcatgattaacatgacttatgttaatcttacagttatgtgcctacattctgtgtcctatctctgcatcttatagaaagtaagataccacttacttcctcagtaacttccacacacactacagcactgtgtacacgtatgtgctctaatatggttctattttgactggcccatgacatgaggaaacagatgaggcggcagggcagatgtagccctcttagatgacgaagaattctaaattccccctcattaatataaatgaacaaatgaagaaaataggcaaagtaggcaaagtttttctgtccattatgttagcagccttttccaaagtgaatcaatgtcccaggtctgagaacctacatttatacagtgaaaatatttgcacaatcaaaaatataacagtggtattttttgctctcctatccaaggaggatttgatacccagatatttcccttaacaagaagggaaggatgactgtgcctctttgtctcaaaacgcaggttgaatgaagctgtggagagtaagattgcaacattcagtgcaatctccatacatcctctggacacatggaatatgcctagctggtgtgccattttagtagtgtcttactacatttcttctttcattaatctaagtgtactttttgttttccacaggaactttctggaaaccacaatttttctcatctaagaaatgatagatttctttcatatcttgcactgcagtcagaatcagcattccttaaataaatggtctcacatagtcccaattctatatgatgacatcatccttgttccctacacatgaaagtatgtgttttgtgatttttttaaagtcagtatctcctatgaagctgtataaaccactaaaatcagactggcagaactgaacttttttttttttcagtcagagaaggatcatgtaaatacaaacaagattcagttagggcaataaaactccatctcatttttttgtaggtctgaaacagctgctttattatgtgagccaagagaagtttgggtggctctactcagaggaattctgtcctaattatcctcaatcatcatggatatcacctgttttgacatccttgattcaaaactggtcttacttcttgattaattttctattacagaatttgtgtttgcatgaagcacatcaatgatacataaagtgtatctgaatgttattttatatgtatcttctctactctttttattgtgttaaatgaccacattattcctttgtaaaacctattacaattatatccaactataataatgtagtataatattattaaaagcaatcccccaaatgcaatactacagtaatgctttaacaaattattgtttcttctctcaaattatataagattttcactgactaaaaaaaagtgcctccatttccttaattacatatatattttctcttgctttcgtctttcaaaagtcataaaattgaactgaaaatatcattatttggattagtagccttgtagaaaaatgctttacaatattacaatttggattagttgtttttgggaaactgaaatcccaccagttccaaaactattgctttcactcctgagaaataactgaaaataaaatgctattttacagtgctattaaaattgggtaggagttgatatgagaagtgaaatcagtcgtttttcaaagaagaccagaaacaaacacaagaaaatctaagagtttaaaaatattaaatatattagattcataaattaatcatgacattggtccaagaggacctcaaactaaaaatacatattgtgcttgttctactcctactgactccctgttttccatttctaagatgctgtagtattatctcaataaaaaattttctggttttgtcaattttctttaatgtgggaaatcattatgatgtatattttcaaagcattttgaatttaaacttaggtaccctggtgttttcagaggtgatataacctttgagatattgctacattactatttgttatcacttaaaaccactcgatatttcctgggatcttggattccaaaattaatgaaccagcttagcaaaatcattgcagatcaccaacagctgtttttatttcacaggacacctaagttagcaaaagccttctggggatttcatattgtcagaaagagaacacagcttgtctggaatatcatcatgccagccaccaagttcataaaaaaactctaaggcagaagagaatacatcctttaactctttttgcctctgaagttggagaggtgatttgttttggacttgaggtcccgtaaaacaagcagacaagattgggtgcggtggctcatgcctgtaatctcagcactttgggaggccgaggcaggtggattatgaggtcaggagattgagagcatcctggctaatatggtgaaaccccatctctccttaaaaaaaaaaaaaaaaaaaaaaaaaaaaaaaaattttcccgggtgtggtggcgggtgcctttattcccagctcctccagaggcaacagagcaagattccttttcaaaaaaaaaaaaaaaccaaccaccaaaaaaaaaaacccaagaaaaaaaaaaaagccgacaagaatagtttttgagacctacataacttttttaccaagtctactcattcgtcattcaacttcaggtgcaagactctggattttgtgcagtgtaaatatatagaaaaaaaaactacaaattttgtcctgaaggacctattagcttatgaatggaagtaatgaatttacacaaacacctggataaatggtgaaaactaaactcacccaattccactggtaccaaacctatgccttctcatacatgccctgttttagtaatgttacccactcccctcagagacagacacctagcaaccttgctaactccttcttctgccattacctttctatccctgctacccaagttttagatgagaaatcaatctcattccctttcccctcaataattgtctgactggttcccctcattccacagcttcttcgagatgacatttctaatataaacatctgatcacattccgtactgataacctacaagctaagctccaaactctcatttggaaagtaaggtctttgccatctgactcctgactgtctctcccatcttagtcctcatcacttccctccatgccatgcaagttccagctactctgagctacttagttatcctcaaacatgtatttaagcacatgccatcgcctgtgtccgttcgtctggaatgtcttgtgccatcccactgtataccctgtgtggttcactgtgaactcattcacccttcattctcagtccaagcatctttttcctgtaatatatttcataatgcctcaataattatatagcattttatctacataatagtatcagttgtcctatgctttcactacctttcaacatgacattgtatttattatcatgtctgtctcaccacgaatttgtgaacttcttgatggtagagacaatatgaattttttttcgtgttcatatccccagttcttagtgcaatactgaacacacagtaaatactcaataactattcaattaaaaatacaattataaagtaataagacaagtcagaacgtggaaaatgccatatccctaataatagttagatatgagttaagagagagtatataaagatgagaaaaacaggaaaagctttatggtgtatgttgcacttgagccaatcatagaagaatgcaaagaatttgcaaacacaaaaatggaagggagaaaaatttagcttggggaattgcatgactggtaacagaaagttgaaaaaaatatttgctgtgtatgaggaactggtttgaatagagaataagggcaagaaaaaaattataataaataaggtagaaaagttaccttagagaatagattcttggaggtcatgaatatccagttaaaaagtataaaattcatattttatctctaagaaataaagtataaatatattgaaaaattgtcttcacacacacattgtatcaggcaagggaactataataaattaagtagaaaagttagcttgggaaaatatggaagtccacatacaattatttttctctaggaaatatggatatattaaaagataaatagaggattctgctatagtttttatataaatacagttatagacattgacattgatatcctggcaaattaaggccaaacaattaaatagaatacagacagtgtagaagaatgattttgacaatctgaatttggataattgaaattcagagtatataaaattttaggagacataatctacataatttggtacctggatagaggaaataggtaaggaaaaggggaaagacaagggagagagatatcagtcaaataacccattgattgagcacctcctctctattaccttgtaccattaatttgcttcccttgtataagccagataagtttactgaaaatggggcccttcattatctgttctgaaactctaccactcagttgagggtgtggtttatttgagttaatcaacaaattttgaatggatctaactacagttgaatagttaataagactatggcttatgttaagtttaccagtctttggtttatcttatgaagggtagtcaacaatcaaatctgtacactgtgccttttgaagacctgggactacataacatatagctcaatgggttcttatagttcagtggcccctgctgtttaatcttaatgcacatggaaaaaaaaaatgtcagcttgaggaagaactctcttattgtaacagtacatacaccgttttatgctaaacatagtgagccataccatgtttgccaacaaattattcttggcaaaaatagcaacaattgtgtatttaaagttccccccaaaatactgtttgtcgttcaaatgatgaaatgtaaatttagaaaaccaagggaattaagacactgaatcttttatgccctctttattacgttttctctgtggaaaataaactgtgctgtataaagtatcaccttgagaaaaaggaatacaaaaatactttggctgccactttacaaaaattctgttagctacttttatttgcacatttttttcttttttctttcctaatggttttcattataatttaaatatatagagaaattacctcccgggatatactaatcttgaatacttccttgttatgtctagaataggttattacaaagcttctaaaaatccttgatatttctaaggaaatataggaactaccaacaattatggtttcctccccgttttctctgtaaattctaaagtaattggatagcattaggccaataattatctaatttgaatttttaaaatatcaaagttgtcaaggaattgtctttctgcgatgtggggcattgaaaggaaacttgtgaattactacccttcttttctgtgtctatacatgacaggatctactgttcctacagttaattcagtcaaagaaaccatttgatctgaatgtgtgaccgaatgaccagtggtttgactgaattcacagccaccgtggctgctctgcccatgcgagtccacaagggctttgtttgcttgctggcagtctctgcacagagaacacacagcatatgccaggtggccatgtgtctgaggcagagggaagggagaacaaagcaaaaaaagattccatttggacagagatgctttaagccatccgactgccagtaacatattaaagagagaagaaaatgcaatgatgcttgaatatactcaacagtaaacaactttaagcctgagcttcagatcacaaatctccctctgccgctgctgacatgctcagcttgaacgtggttgcaggagacaaaggaacctgctccaggaagaaaacagaagagagaattctcaccctgattttaatctatctcagatgaatgttgaagaaccagtgataccataacaattgtattcttatgtcaaaaacctgttctgttgaaggtgagaatagaggaagaaggttctagaatggcaaaaacgagaactcactttcctgtccacctcttttttctttatgtcaaccctccatttggcacttatcacactgctcaccactggcttcccaacaaaccgtgaaatgaaaaagacagatgttaatgccatctcagaagagttgggagctgcaaactattattttagaaagtcagcagggcaatgtggattcctttaaaagtggaatatcatttctcaaataagtgtaatattgcccccattccctgcctcatgatttaggataaataaattttcttttctgtattattttctcattactcattaattgagtagctgatatgggctagatagtgtgctagcagcctgatcttcattcagtattttcagtcttcccaacagtgctactgagccccactgtgttcatcttacagatggaaatactgacattcagaggagttagttaacttgcctaggtgattcagctaataagtgcaagaaagatttcaatccaaggtgatttgattctgaagcctgtgctaatcacattacaccaagctacaacttcatttataaataataagtcagctttcaagggcctttcaggtgtcctgcacttctacaagctgtgccatttagtgaacacaaaatgagccttctgatgaagtagtcttttcattatttcagatattagaacactaaaattcttagctgccagctgattgaaggctgggacaaaattcaaacatgcatctacaacaatatatatctcaatgttagtctccaaattctattgacttcaactcaagagaatataaagagctagtctttatacactctttaaggtatgatatcatctggaaagtaacaaaattgatgcaaatttgaatgaactttatcatggtgtatttacacaatgtgtttcttctccctgcaatgtatttctttctctaattccttccatttgatctttcatacacaatctggttctgatgtatgttttttggatgcacttttcaactccaaaagacagagctagttactttcttcctggtgctccaagcactgtatttgtatctgtattcaagccctttgcaatattgtactggatcattatttcacctctaggatggcttccccaggcaacttgtgttcacccagagactacattttgtatcttgttgacctttgaacttccaccagtgtctaaaaataatatgtatgcaaaattacttgctatgagaatgtataattaaacaatataaaaaggagaagcaaggagagaaacacaggtgtgtatttgtgtttgtgtgcttaaaaggcagtgtggaaaaggaagaaatgccatttatagtgaggagacaaagttatattacctcttatctggcttttaaggagattttgctgagctaaaaatcctatattcatagaaaagccttacctgagttgccaataccatctaagattattctttaaaaaggattttaaagatctaatttactttttgtcatgcactgcttgctatttgcattccactctggctgaacattgaaatgagacgagcctttatcacctttgtgtctggtcacgtctgcttcctcatctccctgtgctagcacagtgctgcagtaccaggctataaacacagcagcaaaatcgttcaggaaaagaaaaagaaaaagaatcagaaaacagaaagctgcttttggtcataattggatgaaaatatatgtaataaaaacatttctatcggtagcaggtttttttaataagttcttcttttctttataactaaatttttgaaaatgcagacatttggccttagatatctcatggatgtaaaattggcatcagatcagtacagtttgctagccaagcttaaaaaggaaaatataatgggaaaacactgtgattttatagttcttataaaaatgagaaaatcacaacctgcacaaaaaccccaagttgaacatcccttaaatctgccacgaaaagaccaagatccatgttttcagttttgaggatgaccttagaaacctacgtggggtttactttagtttaccctaacgtaactgtagatccatctcagcaaacagatgtgcagaacatgagctgtacattcattggctcaggaaacggaattgagaatttaagctgatttccatttttattatgtagtatgacttttgcttctttgttctctcataataaacttcagtccccttgaaaataccctaactgataacctctaacagggttagattgtatgagctgactgtagacttgtttatgactgccttactcaaatatgcacctgacatcctttctctcagtggaataacaaatcagatctttccagagcagaagagaggtacaagctcttcctaataaaataaatatagtaccacttgtgtatggtagaatcttttgaaccaaattaaaactgtatttttgagacagacctttagcatggaaaactcagcatctacaaccttgctaaaaaagagattgcactgaaagattcgccacctccgcggtgggcatttgtaccaactctttattttttacccaccaaacccttttacctcccttgtcttgtctctctgtgctcccagagatgattgttgtgaattcatgtcctcagctctcctgcaggctggacttcagttaggtttggcccacaaccccaccaacaaaagagggtgggaacacttactctacttttccttgctgctttggtgccacaactgtggcagtgactgtgtccctctccagttatgcttttatcagagagtccttttccatggtcctcattccagtgacccaccatcactccaggtcgttcctgtgtccctttcgcccttggagcggccacatcttcctaatattgctggtatttggatgtctgaccaactcttgtttgctttcttatccctgttcacactctaactgttgtttcttttttaaaaacttttcatatgaaccacctgtgatgaatccagtgtcctgcttggaccttaatgctaaagaatgcaaacatttctttctttaaaacaaaaatcaatgcttacttgaacaaaataatctactagacagtcacagatggattctaattggcttgcagtagtaggaaggccactgtgatcaaggttatctaacttccttcacccttactctctgtggcagagactgatagaacatgaagcaactaaagtctgtgtcttctaagaacttcaaggaagctgtcaaaagtcttccagagtctttaaggaatctgctagattgagtggaaatatttcatattgatggaggcagagagggcacatgtatattctcctggctgagacacagcataaagtcaaggaggaaggggacagagaagatctaccaaagtctagtcccctttaacttgaagtggcaaggatggctgaattctaggacatctcagtaaaagaaaaaggtttctaagacatctttttgcccagaaaataaggacatcctcacaaaatgagctgaacatatcaggacaacccaggatttaaagatataaaggggatcccactgaccaaatctggacatttgagctaaaaaaaaaaagtagtgataatcatttataactcactgagttacatgagcatccctgagttcatatggaaagaaaaatagaaagaaagctctttcttacagtaaaatgccaactaatacatgtaacatcataatggagttaataatctagcactaataatcaatggatttcaaattagtgggtgaaaatttgataaagaagaggctatttcagagtgtcaaagaatgtccccaccaattgcttattaattactaagagaaaaataacagttttaccatggagaaacctaacagataccatggaagggtggcagaatatgccacccaaaatatgccgctttggtataaggattcctttgagttaaagagactttaaaaataagtagcaggtgcaggaaggacactctgatcctccttttattcttcctgaaaataggagataaaagccccatatggaagatgtcttgcctataccagaaggaaagtaacattcttatcatcaaggacatgaagttgagactgagagagttctgtacaaacagaccttgttaaaataattcttatcttccttcagcaacattcccccaccccgtgtagtctagttacttttccacaattgcctctttttcaatctaatataaaaacatttaggttttgctacttctttgggtcatcattttcttatgaggactcctgtgttatgtaaaacttttatgagataaatctgtatgtttttctctgtgaatctgtcttatgtaagtttaattctttggcccactgaaaaactaagaggcaagaggtaaaattttgcctcccctgaaccatcttaatcaagggttccatcaaagttactatcaccaatatagcaaaaagtcctattacgtgcctcctgagatgatatgcgagaataaacaactcactttttttgtaatattcttgctgaaactgagtgatggactcctctgttaactcagggttcttgatacagagaaatcgctcttgctttcatgttgctcacctgacagaaactgcaatctcatgtgttggaaaatatgtacctgctgagatggtacaaggggaagcagagagagagaaatcttcaaagactgttggcattccaaaaggctgtgcctgaggccactaatgtaaaactgaagactgtgagaaggatgtaactagaagagagggtctgagagatgatgaagaaagagaacagagctgggtgtggtggctcatgcctgtaatcccagtactttagggggttgaggctggaggatttcttgaggccaggggttcaagaccagcctgggcaacacagtgagacctcatctccataaaatatttaaaaattagtcaggtgaggtggcatacacctgtagtcccagctgctggggaggttgaggcaggacaggaggatctcttgagcccaggagttggaagctgcagtgagctctgattgcaccattgcactatagcctgggtgacagagggagatcctgtctcaaaacagaaaaaataaataaaataaaaggcaaagtggactaatggaagaccatagatctactctttttttttcatggatctactcttaagtcattttttcttcttgccttgactatgaatattccagaacttctgcttaaatagaatattttatttcacttagaatctgtggcatgtctactaaacattttctttctccgatttttcatctctcaagccttctgtgagacaggaccccatttattatatcagatatttaagctgccaacattttcaacttgctcatgatttctctattattattcaaatgttaacatctcattcaattctagagcccagtgtttggtgaaattccttcttatatcagtatcagtattggctgtcaaagaggtttcctttatttgtgtttctgtttttctcctggcaattgtttcaatgtaatatataatattcatctagtttggatatctattttgacatccaactcaattgtataccaactgtgctactacgaattccattacacttcaatctttgactcatactcaatataaatatattttaaatgaaggttagagcatgtaagaactttaagatgtcttttttttaaaaaaaataatgaaaccacatatgcccttgtccttttcttcctttggatttagaatgagaggtacaatcatttatcagagaactttagttagcaagtagtgaagcatctataaaaatatattgccacatatactcttaaagttgctactcttagcatctctatttaaaataaggctatgggaggtggttggcaggatggccgaaaaggaacagttctgatctgcagctcccagtgagatcaacacagaaggtggatggtttctgcatttcctactgaggtatccagcttatctcactgggactggttagacagtgggtgcagcccatggaaggtgagctgaagcaggatggggctttcagaggaaggaacaggcagcaatctttgctgttctgctgcctctgctggtgatacccaggcaaacagggtctggagtggacctccagcagcctccggtagacctgcagcagagaggcctgactgtcaaaaggaaaactaacaaatagaaaggaatagcataaacatcaacaaaaaagacctccacacagaaaccccatccaaaggtcaccaacttcaaagaccaaaagtagataaatctatgaacatgaggaaaaaccagctcaaaaagtttgaaaattcccaaaaccagaacacctcttctcctccaaaggatcacaactcctcaccagctagggaacaaaactggatggggaatgagtttgacgaatttaaagaagttggcttcagaaggtgggtaataacaaactccttcaagctaaaggagcatgttctaacccaaaggaaggaagctaagaaccttgaaaaaaggatagacgagttgctaactagaataaccagtttagagaagaacataaatgacctgatggatctgaaaaacacagcacgagaacttcatgaagcatacacaaatatcaatagccgaattaatcaagtggaaataaggatatcagagattgaagatcaatttaatgaaataaagtgtgaagacaagattagagaaaacagaatgaaaaggatgaagaaagcctccaagaaatatgggactatgtgacgagaccaaacctacatttgattggtgtacctgaaagtgatggggagaatggaagcaagttggaaaacacttctcaggatattattcaggagaacttccccaacttagcaagacagggcaacattcaaattcagaaaatacagacaacgccacaaagatactccttgagaagagcaaccccaagacacataatcgtcagattcaccaaggtggaaatgaaagaaaaaatgttaagggcagccagagagaaaggtctgctcttgaatgactactggataaataatgacattaagggagaaataaagaagttctttgaaaccaatgagaatgaagacacaatgtaccagaatctctgggacacagctaaagcagtgattagagggaaatttatggcactaaatgcccacagggtaaagcgggaaagatctaaaatcaacaccctaacatcacaattaaaactagagaagcaagagcaaacaaattcaaaaggcagcagaagacaagaaataactaagatcagagctgaactgaaggagatggagacatgaaaaacctttcaaaaaatcaatgaatccaggagctgatttttagaaaagatcaacaaaatagactaccggccaaactaataaagaaaaaaagagaggataatcaaatagagactataaaaatgataaaggggttatcaccactgatcccacagaaatacaaactaccatcagagaatactataaacacctctacacaaataaactagaaaatctagaagaaatggatatattcctggacacatacaccctcccaagactaaaccaggaataagttgaatccctgaatagacaaataacaagttctgaaattgaggcagtaattaatagcctaccaaacaaaaaagcccaggaccagacggattcacagctgaattctactagaagtacaaaagggagctggtaccgtctcttctgaaaccattccaaaccacagaaaaaaagagactcctccctaactcattttatgaagccagcatcatcctgataccaaaacctggcagagacacaacaacaacaaaaattttaggccaatatccctgatgaacatcgatgtgaaaatcctcaataaaatactggtaaatttaatccagcagcacatcaaaaagcttatccaccacaaccaagtcagcttcatccctgggatgcaaggctctttaaacatacacaaatcaataaacataatccatcacataaacagaaccaatgacaaaaatcacatgattatctcaataacgcaaaaaaggtcttcaataaaattcaacaccacttcatgctaaaaacattcaataaactaggtattgatgaaacatatctcgaaatcttaaaagctatttacgacaagcccacagcaaatatcatactgaatgtgcaaaagctggaagtattccctttgaaaaccggcacaagacaaggatgccctctctcaccactcctattcagcatagtattggaagttctggccagggcaatcatgcaagagaaagaaataaggagtattcagataggaagaaaggaagtcaaattgcccctgtttgcagatgacatgattgtatatttagaaaaccccatcatctcagcccaaaatctccttaagctgataagaaatttcagcaaagtcttgggatacaaaatcaatgtgcaaaaatcacaagcattcctatacaccaataatagacaaacaaagagccaaatcatgagtgaactcccattaacaattgctacaaagagaaaaaaatacctagtaatacaacttacaagggatgtgaaggacctcttcaaggagaaatacaaaccattgctcaaggaaataagagacgacacaaactaatgggaaaacattccatgctcatgaataggaagaatcaagatcgtgaaaatggccatactgcccaaggtaatttataaattcaatgttatccccagcaagctatcattgactttcttcacagaattaagaaaaaaacaacactttaaatttcatatgggaccaaaaaagaccctgtatagtcaagacaatcctaagcaaaaagaacaaagctggaggcttcatgctacttgacttcaaactatactacaaggctacagtaaccaaaacagcatggtactcttaccaaaacagatatatagagcaatggaacagaacagaggcctcagatataatgccacacatctacaaccatttgatctttgacaaacctgacaaaaacaagaaatggggaaaggattccctatttaataaatggtgttgggaaaaactgtccagccatgtgcagaaaattgaaactgaacccttccttacaccttatacaaaaattaactcatggtagattaaagacttaaatataagacctaaaaccttaaaaaccctagaagaaaacctgacaatacccttcaggacttaggcatgggcaaagacttcatgactaaaacaccaaaagcaatggcaacaaaagccaaaattgaccaatgggatctaattgaactaaagagcttctgcacagaaaaaaaacaaaacaaacaaacaaaaaaaaactatcatcagagtgaacaggcagcctacagaatgggacaaaatttttgcactctatccatctgacaaagggctaatatccagaatatacaagaaacttaaacaaatttacaagaaaaaaacaaccccatcaaaaagtgggtgaaggatatgaacagacacttcccaaagaagacatttatgcggccaacaaacatatgaaaaaaagctcatcatcactggtcattagagaaatgcaaatcaaaaccacaatgagataccatctcatggcagttagaacggcaatcattaaaaagtcaggaaaaaacagatgctggagagaatgtggagaaataggaatgcttttacactgttggtgggagtgtaaattagctcaaccattgtagaagacagtgtggcgattcctcaaggatctagaaccagaaataccatttgacccagcaatcccattactgggtatatacccaaaggattataaatcattctactataaagacacatgcacacgtacggttattgcagcactgtttacaatagcaaaggcttggaacgaactcaaatgcccatcaatgatagactggatacagaaaatgtggcacatatacaccatggaatactatgcagccataaaaaaggatgaattcatgtcctttgcagggacatggatgaagctggaaaccatcattctcagcaaactaacacaggagcagaaaaccaacactgcatgttctcactcataattgggaggtgaacaacgagaacacatggacacagggaggggaacattacacaccagggcctgttgggggatgggaggctaggggagggatagcattaggagaaatacctaatgtagatgataggttgatgggtgcagcaaaccaccatggcatgtgtatacctgtgtaacaaacctgcacattctgcacatgtatcccagaaatgaaggtataaaaaaaagagttgatcagtccaactttattcaactagaggtgtgttcaaggtgtttttgtcatatggtaatgacaatcttacagtgcatttcaaaaagttacttctacaagagctatttgtatttaaaactataataaaaagtataataaaaatgaaataaaataaggacatggaaatgttttctaaacatggttctttgatgtaaaagagatctatttaagcaatttatatatattcctgtaaatacaaatatacccttgttattaagggctataatccaaattttatatcaaatagtcttgaaataaaatctaataaaaagaggtaaaagattggacctttctaactgtattttagtgtagaagttattcagaattcctttatttttgttatacttttcttttccctttggaatctgtgaaagactttgaagaactgaggaacttttccaaggtggtctcaaatgttttgtttcccttagatgttcttgcctaccccgtcttgcagacaaacttgacccttagctcttcctcctcaagaacaattcttaccccttctgagaccatccttgaccaactattctctgaaactagcaaggcttgacatgcttttcctgctaaaaccctataaagcattctgtcatttttctcaagttagaattttccttgacagctttctgatgctcagtatttttgaaatttgcttaggctaatggtattcttgctgcttttcttccatggaatatactatgtatgtatgtatgttggtatatgtatagttgtgtgtgcgtttgtatatatatatgtgtgtgtgtgtgtgtgtgtgtgtgtgtatacacatataatgagtttaactgtcataatggtttaaagtcaatgaagtgtttaaccttaattctccatttaatcgttatggcaaagaataatattcccccctgtgttacagaagggaatgtaggttcaggcaggatatagtaggaaatgtggtgtgggagacaagatagggaatgtataagtaggataaggttaaaataaaatgtgagttcagttctgacatcatgagtttaaagtcactcctctgaggtatctaagggcagatgcaagtagtttgatgtatggtctgaggctcagtagttagatcacagcaagactgggaatcatgaaaagatagaaattgaaaattttgcttaggggcaattccactatgtaaattagtttaaaaactaatcataaacttagcccaaggaattttacatcatggaataccctacaaatagacgtaatatttcaagcctagtatcaatgttctactgaatcctcttgcaatggacacagtaaatcgtccattacaaagaacttggaattattcatatctgagtaggcctataacacgctcaatcatcataattaactttccttcttcatgttataaaaattctcttaattggtataaaaattctctcatttcctcaattgagttatgatgtttcactttagggtttgtgaagtgatcacagctataccttttctaagttatgaacctaaaactaataaaaccatatgggattctgtcagttatttttcattttctgttccaacatcttagcctacttgaaggactttgctaaatattagatttcttaatcttatcttaaaatactatgcttttattttggagaagcttcaatctctaacaaataatctgataaactctttaatatatttcataattttaccaattactaagccagaatttagatggcccatttgaaagagaatgtttccttactaagcaaatctttacacttacacctctatctactcaccatatccttcatttaaccccccaattgcttcctgtttgttccctttgttttatttccgtttttcaccaaatatagtttgaggaaaattttctcagactctatggtgaatttttacctctacagaaagctgaactaaaaagactgcaaatacttcctcataaagaaccagtcacactacttgcagggtgtgcctcaaccagcaatgaatgaccccaccttctgagacagcctgacagccctaaggttgtaggctaaatcctaatggggtacagtgtttatatagcagacctatcaaagactaagattcctcttccagaatgccacaaaatgggttttctatgagaacttcactttcaggttattacattatctaattaattgttttaaaaaattgtagtcacttgcaatattttaaagttatttcttttcagattataaaggcaaaataaatttaacagaattacatattttttctacagaatctttttatgttttcatttcactttactaagtctcatgaagcctgtgtgctaattttgacaacagtttctatccagatcttatcagacaagataactcagacagtggtcaagggattccctaactcttattacagtggagtttctagtgcttctctaatatgtgtatgtacttcctccaaaattctgcttccctaacaggttcgtttttattctgtatggccaacctaaggatgtagaaaagccagaattatatttaagactttcccaactgtcagttttgtacccaaacaaactagtcattgctgtccctcagaaggaaagctgcctctcacatataaagaaccttcctcttggaagattctgtatcttaaaaggttgttttgaaatgttgatgtaccatataagtaaaaaaattctccaggcagattaaatgcatatataaatttataatagcccactgactccagttggcagaattatagctttaggataagtggcaaaacactttccaaagaagttcggagactcttttttgtctgtctgccaagtcctccccaccgaatctcacacactgactaatgcatatgcttggtggtgtaagattccagggaatggtctttactgaggctggtaggtgagaatactttcagtcaagacctatgtgaattcttgacttgggcaggttttggcttccactatatttgtaaaggctttcctgttgtatacataccaacatcagcaaaatgggtgttcttccgcttctaattcccattcagtcatctcaaatatgaagtatgttttacaattttaaaatgttaattgtgaaacattttgcaaaatacatattgtttaaagataagaaaaatagaagtaaatttcccgcttagttgtttttaatcatttctactcattactctaaagagtatttttacgccttgtccttttttatttatccattaatgttggaaagtatctacttgctccctactctataaatgaaaaattaaaattctaaaatttcctttaactattcttactgacctctcacttctatcagacaaaaacttgcgcttttatgttatcagtgttcactgtaagtaattgttattattcactgttgctaaatattccattataaaaatatattataatgtattgatttattctcctgcatatgatgaataattgggttgcttccggtttgaagatattataaagttactataaaaattttatgtacttttttttgttgccataagcactcattcctattacatatctaactcagagcagaattggttgtgtatatattcagcttttgtcaatactgcaaaacacttttccagcaaagtgattattgagttatggagtgttaatttgtataatttttgagaaatctgtttaattcatattctcactaacacttggcatttttaacctttaaaattgtagtcattcttctttatagtgtccttttttaaaaaaaattaattttgggctgatgactaatgattccaaccacattttcttatggctactggccctttggctatcctattcggttaagtgactgttaaagcatctggtttatttttattttttagatactatcttgctctgtcactcaggctgtagtgcagtagcactatcatggttcactgcagcctcaagctctaggcttaagcaatcctcccacctcagcctcccacatagttgggacgataggcgtgcaccaccacacccagctgatttttaaattttttaaagagatgggagtctcactatgctgctccagcttgtctcaaactcctgggctccagcagtccttccaccgtgacctcccaaggtgctgggattataggcatgagcctctacacccagcccatttttaaaattattccttttctcattgattcattggaattttttatacaactagtctgactattcacactattaaagctatcttttagtaaacagaagtagctaatttaaattatcttgtttattaatcttttcttttatacttaacaatttagaaatcctcctaccctaatattgtgaaggcactttcctaagatttcttctagagaagtattgttctttggacttctacatgtatgtctaagatccactgcaaattcagttttgtaagcggtgtaagttaaggtacagattaatttatttttcaaacagatatccaattgatgcaaccatttagcaaagccaccattttttccacactgcggtgctgtgacatccttgtgataaatcaggtgattatatgtgtaggttagcttctgaatatcttattccgttctattggcctatttctttacttttacatgaacacggcactgttttaattactgcacgtttataataagacttgatctttgtacagttcagccagatttgttctttttcaagatcgccttgctattctagatccttggcatttccacacgttttatttatttatttagagttatttatttattttgagaccgagtttcactctggtgcccaggctggagtgcagtggcatgatcttggctcactgcaatttctgtctactgggttcaagcgattctcctgcctcagcctcctgagtagctgggactacaagcgcctgccaccatgcctagctaatttttgtatctttagtagagatgggatttcaccctgttggccaggctggtctcaaacttctgacctcaagtgatctgcccacctcggcctcccaaagcgctgggattacaggctccatacatgttttagaattagcatgccaatcacctctccccaatttaaaaaaggaaaaagaaaaatagctttctgttatattgattgagagaacattgaatctatggatcaatttgaggagaattttcatttttatgatattaagacttccaatgcaagaaagtatatcccttcatttatttagatttaaaaaatttttctcagaagtttacttgtgcacaacgtagaggagttgggtgtctctcataattattattttggtatttgaggttttgatgtgtgctcttgtaaatagtatttattgatttctttcttaacatgtgctgctaatttatagaaatgtaaatttttatatgttgatttattattttgcatgtacatatgccttttttttcagtgaaaagttctaattaactttaagcaattcatttccttttagagtgtttgcttgtttgtttgttttgtttaagaaatttagttaggtgtgttagttctgtgattcagtagacttttgcctaatgagattattcctttacctttctaccaatagaagcaagaaatagcaaaagaaacgcagatgaggaggcactacaagatccctaccatagataccactagttgccagccagtaactttttcctaagtatcgggtagacatgtagcttacaactctcgaataaaattgaaattatagagtttttaattcatggacggtattacagaatacatacgctgctttaacgcaattaagttcctgagatttgaaaaggacaagtacaactgcaaggtctaactcacatcccaagtagctaatttattcatctagttgaatctggctcttcgagtttcatagtaagcagaactttgccactgaactcacttctaagctttagcagatttgttttattgggaaaatgagctatttatattttaatagtattttatgtcttttaattttttttctgcctaaccaactggaataaatgtctctcaagataaccaatgaaatttcaaagcaaaaccatttatcttagttccgtggaaatttaacttgacaaaaattatccctaaaatgttattgaactccttccagggccaatagaagcagagactccttcttttgcctcggcttccaggattccggtatgaaaccgctgccatttgcactgcacactaatgacaagctggatgtttgcatgaaagccaatatgttcctacactgctttttgagacaagtaataatcagtctgtcatcaatgtcatgctgcaatcaggctttgacaaggtttgcaaataacttgaaaggaattgctcatccctgaacactacagatcaaaaccagacctgaacaaaaactagaagtctgctgagtgtcagctgcagagtcttaggaaacgtgctgtgaataagcagaagcaacagcagagggaacaaccaagccttagccacccgcaacccatgtttataattaaaaaaaaattttttttttgaatatagcttttttcagtgactaaccctgagaactcgctagtcaaaatgacaatgtagccaccagaaacacccagcctggttagaagtaccacctgtattattcttgaagatgactggaaaagcaaatagcatgcccatcttcgtgtggtttgttctctcatctcatagactgcagcaggcaggattttgggtcaaacccagcactcccatcagtgaagagattgtgtgcacaaagattgaatcaccaattgctttctttttctctcctcccttcctaaattcttcccatttcattgagggaatgaagtatgtattgtttgttcactgctgttcctgatgtatgttaatctgcaggcctatccagtactaagaaacaagttaaatttatatataaaagttttgagagcaagatcctttggaagaaaatattaaagatttttttttaagtatcagctggtcacagttctgctcagagcttcaaatcttgtttgtacttcatgtttgtatatatagcgggacaatcatggtacgtatgtacttaagcattcatgaattatgcctaatacatgagtacagacttgagatgtgagttcttgttgattttattgtagcccacaataagaagttatttcagagttatcttggtgatctttaaaaggaactctgaaaatcaggtgctattgacactcaaagtaaagatagcagtgaaagaaaagaaaatcagaatgaagttaagtgaaagtccacattccaaaaagaaaaaaactatagacacatttaaaatcccatatcatgtgattacaatcttttgagattgtaggccatatagtcctaaaataaatgtccaataaagtatccattttataaatatatgctgagcaccataatattggctcagcactatgttagctattatgagagataagaatgttgtgtaaaaattcctgtttttcaaggagtttgtgatctggttagggagaagatattaatgcacatgaacaagtatcagtagcttttggaaagttcataatgtaagcactgaaatatgagacaagaaacactcttgaactatactgaggacttgtaacaaatgtctataagtatatcgttaagccacatttgattatcctctaacttttcctgtcttctgagcttacttatcctgtaccatttcacaaatacctaagtctcacccccataagaacagaaatccagaccccatttctgctgtttctgaggtcccacagtgagtgtgtattgtaggggtggcagtcatttgtcatttctcaattttgtctctagagctaggattcttcagcattgtctcagtccattccatcattggttctctttgctgagcctgttctgtctagtcaattgcccctccaagacatggatatgtatccacacattggcttccttacagcagcttacttgataccacattggtttaacaaactaacttgaagttctaaggattgcattaaaaaattacaatgcagggggaaagaaccttaaaattgattataaagtagcatgtctcctggagtgtatcagctatgcctgtcctttttttattctaaggcccttttctcttcccctgaaatctgagacccttctgtcccaaactacctaactttccagcctcttttctctggtttccttagtgcaaatcccgaaatcagttacaacgtgacaacgtttcaagtttgtggttctgctcagaataaaaccagacttttacataattggcagagctctctatactctcaactcaaatacatgctatagggtaagctctgggccttatttaaattaaatatgttaaaatgagggggaaaaaaaccctaaacaagatttgttgaattctgcttaaaaatgtagtaatatttatgcattttgtgaaattagtcactcaaatacaccacaaatctacttagcaattttaacaattactatgtatctttaattgctgaaagaatttacacaggggatgatactctctgtagaaagaagaagttttaaattactattcattttatgattgaagcccaatgtcttaattgatagataacaagttttttcaataatttaccttcctgaaaaccatacattctcattcagtgacaaagctcagtgtagcaaatttgtgtaccatttaacagaaaagttttgtagtgctctaggtataatatggaagcccataaataaatgtatttattctttccctgcttcctagacacatttttgcttctctttccatgacagtactgaaaaactttcagttaaccaataatttccattagaaaatcatcttcctcatggaaaactaaaatatggttataatttagatatcttagagaagtcacaaggatatcatattctaaaatattaggtatgagtctctttaatattgtgcttctcaattccatttcaaatagcttaccaagctttcaaaaaaatcttgaagaatagccaaatgttttaggagactcagaagtaattgagctcagaatcaaggacagagttctgtggcatacactggagatctcctggtggactcactgcctaagtcatttgttcaaaaaatatttgctgaatgcctactacggacactgctgtgctgggagctggtgaatcagcgatgaactatgggagctggtgagtcagtgatgaaccggacagccaagtactgacctttaagaatcctatgcagtaacagaagagaaaaatgatgaccaaggacacaagaaaaaaataataattgaacattgtattgaatgcaaggaaggagatatccacaaagttatgctgcagcagaaataaatgtaaatgtccttaaacatattttttaaagtttcaacttcaaaaatagaaaaaaattaattgaaactacagtgacaaaatttttcgcctatctgataaaaattgaaaagtttgatagcacattctgtaagtaagaatgaaggaaaagggcattctgattgtaaatataaatgagtttatcctgtgtggaaggcaatttaatagtatctatcaatatataaaaatatacaacttttgtcccttaattagaaataggaatatgacctattaaatttgttcttatttgtacaaaagagtgtcatgtacaggattattcactgcaattgtgtttttagtgagagaatattggaaaaatatctaaacatgcatcaataaatggtcactttcttacattatacgacaaagataaaataaaatgcaatgtagccacaacgcagaatgtgaacatagctttttgctcatttgtttgtttgctgatatgggcccatctacaagatagtgttgaggaaaaaaattaagcttccgtatttgtataagatgttaaaaagaatgtgagcacttatatgtgtatatgcttaaaatatctctgaaagtggagtgagttttttcaatgtacatatttccttttgttccttttaaattttgaattatgtgaatatattctctttaaatcatttaaatattttggtaaagataaaaatttccagtagtatctattatgggattctcattaccatctctataagctgtagggtttgagagcaaagtttttgaaaaatttattatgtcagattcaactgaagtaatatgtatcagaagctactgggttcaagccactgtgcttttgagaaataaaattaaaataaagaccttgtacccagaaaatgcagtttaatggatgtatctatttttatagaaaacataaattgtgataaaataattagtaggagaacaaagacttaagttttcctatacctttcaaaacttttccagagtaagcaccaagtactggatttaaataattactaaaagtttctagcatcttatttgtaaaactcaatttattttatgtaaatccccaaaggattgtttggcatatcctttgaatattattgacatatatgtgatgaacactacttattaaaagattatggaaaaggtgttctaaaagaatctgcattagacatctatttaattaaatttattgttaagattatccaaaaaagtcagaaatctgatgtgttctttggaaatcacatagactagactctaaaaaaccatgctagcaaaaaaatgcactatgttaaaatgtctggatctgtcctgtttattttctattatctgccatttcatttcctacctataattttattaaatggctttgaaactacaatgatgcatgcaaactgcacattttttgttattgctgtttaaatatgcacaagcctggaattgatggagaatttattatatcccccaaaatgagaggaaataaaacagacatgaatattcaaaacagaactacaaggttagaagtctgaatgtcataatataatagcaacaataagtgatcacacaagtcattcatgttccttttctttttaggagtggatccagaatttgtggaatttaaagcttacataatggtgagaggggggagtaaggattaaaaaaaaaatttacaaatgcaaatttagttacagggccttagaaagagcccttacaagagaggatccttgaagatgaaacttatttgcttcacagaaatttactttgcttctcttagcaaacaaatttccttaaacttcattctctggtttagtatgaatatttatttgggatggtggcagatgtgcatatcaataagtcataagtaatcaaaataagttttccatatcactatctagatgacattcccatttattaggttttcctcatttgagaaagaaaaattaaatctgccatatcagattcaatagaacagaccaaaaatttcctctcacagaacatagcatcttgcaatgcaatttacatactgttcttttagcttacttgtggaaaattcaacaatgattttttttatttctcaaaagctgtctgcaattgcagctctgacatttaattctctcaccattgagtatttattagtatgatagcatgcagctctttcccttctgcgggatccctctctattcagtcttgactgcagatatatgcagaatttcccttgaggtaagaaaaaggcagacatgtctaagttttctccttttcattatgccagggggaaaccagtttctgttaattctggtaaccatgttatctaactctcaaaacaggaaaaatgatggggaagagcggaggcagaagttctgagaagcatcccctggttattgttgccagggcaactgaaacttggcatcctccaaatagtcatcgtctgtcacactaggggtataattcacaggcatgcaacacttttcagtggatctttaaaaaaatagtgggggaggggtgaggaataaatgagaattttaaataggcaagtagacaaaatgcatgcctaatatttagagagataataggcataagagaaatacacttttgaaaaatgtaagtgtcactgttatatattactctgtttcttattgcacaaattagccactatgcaatctcaataattgtctacccatctggcttcttttacgagaaccccttcttcctccaaataatagtcttctgtagtatgacttcagactaaacatatgcagagatttagatgtcattttctttttcacagtccttaagaaagccaagaatattttcatacttttcattgtttaccagaatgtctgacgtagaggccagcctggtcttgctataagagaagacaaagtatttattactccactattcattgagaaaaacagccttgagccttgaaatgcccttggctaaatctaaattgtacaattcatttttcttatgtttgcatttcttagagccaaggtgtctgcttaatctttctaatcaccaac[450 bp omitted]gataatgaaactaggcaccaaagcaaataaaaaatacttccttaattactgggcttaacatttcacattggctcagccaaatcacccctggctttggtactattttacatactgtttttaatgtaatcacccacatttcgtgaaccaatacacccactacttggaactccaaagaaggaataatcacataatggcatccataataaaaataatggctcatttttgctaagcatttattataagccagccactatcatatatactttacagagattacctcatttaatgctcacattatgagactctgaattaaattattctcattgtacagattaaggaattaaggcacaaagaagctatgtaggctcaagtttgcatagcaagaagatggcggtaccaggatagaagatccgttttttacattagtgtcccttgctgtggcaatttggttggatgcccgctctccacttgggcctgtgttctcctcttacccagagtatttctgtgagtttgggctgcaacttttctacctaatccttactttttatgtggcagatgcttctggttaccttctttctggatctcttgttctcatccagatccctttttatatttatgtttgcattaaactctaatattgtagcttgaagcaaccaagagactcatctgtgtatcctaagttttatttcttctcttgacattctctgatggtatcatcgtgcctaggtagatatctaatcctgagcaatatcttctactacttcccaccttgcttttttggtttatgtaccttggatatgggaccatttgaatttgcatgtactatggtttgcacctagggaattggtacctaaaaaaaatctcactgccccccatcccacatacagactcacaaatggatactctgcctctcaatgatttttatccatgcagaataaaattgtgcagaataacctgacatgtaccatgctagtaaacataaacttcctgagagaataaattctgagcatcttgacagcaaagacggaatgttgctcatttttatacttgcatctcaagtaaataactagtgctgttcattatatacagatctcaataaccaattagaaattaaatgagatcatatgccgagaaactagcattataatttgcattaatgagtatactagtcaggctatgctaggctgtactgcactaacaagcacacccaaatctcagcagcttttcaaaacacaagtttatttttcattctccttgtctgtgccttgaaggttagcatgcagactctgcttatcatagtcattcatgctccaggtgattaaatctccatctcaacacatgttctcatgtggctgagaccaaaacaaaacaaaaaaaagaaataaaacaaatatcttgtttaactttctgtccagaaatgaccgatattatcttcattcacctattattgggcaaagtaaaacaatatggccattcctaactactaaaagggcaggtacatgcaatctttctgttgactgggaagaagaaatgaacaagaatatctgggaacagcccaaatgactatggtaaggaacatgccgtttatgccttttctccagagtaattccttatattagtgcatatgtgctcagtttatcatcttagcccagaaattgtgtggcaagcagtaaggagagaaaaggcagtaataggggggcagatatcaaggatatatcaagttcaagcagagtggcaccgtcatagaggaggagaggagagagaggaccacaaaaagcagtcaaccccagtcagttttattcagggggaaagaacctagactctgtggcaataattttaaggaaagtaggatattggtcacacttcattgcataaaatgtggaaagatgttatcagtgtatccaggaagtaatgtgccctacccaatacatcccagagagaaacaagaatacattgtctaatttccatttcctttttgacacatctgtgaactttatgaggtcaagtgccctgtttgtgtctaacctaaaacctcttgatgtgtgtatgtcaaaaaaggccaacagtgtacctgcaaaaataataatcttgtgtatgaattatatgttctggatgaatccaaacaaaaaatttcactcataaaacctcccagtaatgaatacaagctgtactgacttaaacaaagtgtggataggatgcagtatgttcaaatttaacagtaggaaaatcacttaactgaagatcacattcctacctagtgccatgattcattcacacatggtgtggagagtcactggttccaagatgatcttcccgaacagtgagcgtattacaagaattacaaagggtaggagataggtccttctttcctctattagtactatctttaaaaagtaattacaaagcattgcagatattctagaatggggaaaaaagtaagtctatgcttacttttatacagtcattcttagttacttgatttttctatagaatgaaatcttttctgttttccttgtagcttcatatataatttctgagatagataatgggaaatttaaatactctagtaattatctccacatatcacaacttctgccaaaaggattaccacatcctttatcctgccttacagggtgtatctctattgtgattacacctggacattcaggcataactgatcattgtggggattattaatgagacaaaactgaaaaacatctatttgcatggagagtgagaatcctctgaggagagacctactcttgaggtaacaggaactttggaatcctgagtctgagctagttataagaacttagttgtcagaagggaatagagattcttagtaccatacaatggctcgtgtataagtctgatgctgggatacacacttgcatgcatatctatataccagagagagaagccttgaagtatagcttaaggcttcctcacagtgtaatgttaaagtatatttttaggcttctctcttcctagcataaggggcaggtttacggaactctgtcacacaccagtgcccaagaaactatgctcagatctcacaaagaagagaggaattttctctaactccttcatgatctccacaggctttgagatcccatgggctcaagaaacaaatgaaagagaacatctctgcccagccatagaagaaactaccagactctgaagtggaaccacttataccagtgcatctacaccaaaaggtggaatgagagtggctgcttttctggcagcgtggagacgaacattagaaagaagatgctggatttgggtagcatgaagcagtgaccgtgtgccccacacccagtgagcagcaagaaccccctctaggactggtggagctggaaccatcattaaaggataaactgctcatctcaaaccagaggcaattaagtgacagagggttctcgatccgacgactctcagcttttgacagtggccatagcaataaaaacagctatgccatgcagaattgtctttggcattgtcagtcatgtgtctacacttgtacctactgctgaacatttgacagaccctcggagactaacatatatgagtctagagtctttgcaggaaactaaagtacatgtgttatcagtagatgatagtaatgatctttcttatttactgaagcctgtatatgacctcatatatattcataaattgctgagattatgaaagttcagatttcatagtgtcactattttcaagcttataagaaattttatattacattatgcttcatatttgttaatggcagttcaaggagcaattcggtgcaatcatagttgtttgtagagaatcccggaggatggaaaactttaagaaaggtcatattttgaaactaatctcaaacatgttatatggatccttctcattttaagtcacaaagagcaatctttccttaaataataaattttgtgatttctgtgatctgtttcagtgatcatttgtcctaataatttatcttattaaatcttgagaatcttttgaaaatataattactttaattttctaagaatctgccagatagtggttcttgaactttctttgttctttttctttaagagtctgtgtgtgtacttcactctcagcagtaaaatttctttaaaaaagctacaaatccaaatatggtgggaaaataatctctgaatttcttgtgaagtgacagtttttggaaataaaccctccctacagcataaaattatttcctcatgatgttgcgcatactaggagctcaataaacatttgttgaatggtggaatcatatttttatgaatgtagtttgggactaaatttatatatcacctgatatgcatcactaagtgatacataaattgccttcatgttcctcaattgataaatttagtccctaaaaccaagaaaaggtatgaacgccactgtatccttaaggcttttaattctaatgtgtattcttttatctgaaaaagaattcctgcttatacagagctggaaatttgcctctctgaaacattacattattaggtttagtgagtttctataaagcattacagagaaagcctgccacacaacctatataagataacttcaaatatttcaacacagccattgtgtgccctcttaggagtctcttttcagtgtaacattggtttctttttcaatcattctttccacacatttgaccatttatttaagccattctttcctccattgtatctaatttgtcatgaccttcttgaattatgattctcagaattgaatacagagttataaatataaactcatcagcattcattgttcaaaccttcaataatatttaatgtacgcccactataatccagctagtgtagtgagcactagtggttaaacaagaaagacatagtctttacttgccttaggaagcttggagtcaaagatgatgccaagattgtagtggagataaccatattaatactaaattataagtttagtaagattacaattacaatagatggatcaaatgtttatctatgggcatcacaattatattatgaaaatcaaatatcatgtttgcatttttaacatcacattaaaatttttattaaaataaatgtagcgatcatctctgttttcatatatttggctaataaagccattcagaaaattaggcacacttgacattgattttctcagaatgaagaaaagaagaaaatacagaaaagcaaaagtctgagttaaaaaatgatataaaagctctggagtgctgataaattgtagcttgcaaaaagaaaggatatgcttaaacaaagatccaaaagtccagaaaacatatacttaaaaaacaaaaaaaattatttttctttaaaacaatatttttacagtagacagaatactaaaataaaaattagaagaccgaatatgaattcaggttgtttaaagcaaatcagttattctcctttaggcttaatatctttatcagaaatatggagtttaaaattttccttcttccctacctatcataagttataatttatttgatggtattttgagaatactgtgataaaataataatgctttgtaaagaataaaccacaatgtaaagatacctacttatttttacagaagaaggagcaaaattatggttacagttaagataaaataacagttgttggacttactctcttaccatataaagctgtaaaatgatgctatcatacacagatagttcagagctctgatcctttaaaaaggaaaatatgagttccacatttgcctcagtttcttctctggtgacactctccaaactgagccatagagaagtggagacagatacaaagcaatagaattactgggtagacaaacagagatctgtaggatttggggctgctgaggtggctaaaatttacgggacagaattttggagaggagagacatataacatactgagaaggaagcccataaatctgcatgtggtctatcttgattcttttatgaaatattaagcttcatttgcacaggctgagacatcataatggtttctgaaagagatctgaatggaagttaaatgaaaattctagagactccttagggctaagaagactgaacctccctaaaaaccatcaacttctatttcagacttcagaaagaccaagttttaggatgagcagtattttagacatactcaagtcttgacaccagcaagctgatctgtgtgtaatcacttatcagaacaatgaataatattctttaaagaagtttacaaattcagatttcagcaatgtagcatccacagtgttgagcatacaatcaaaagtacaatgtttgtaaataaatagagaaaaatgtagaataaacagtcaatagacatagacacagagatgacacatagaagacgtgaatatcagcattatgacacaaggttcttcatatagttatgataaatatactcaagaaattcaaggacaaactggatataataaataaacagatgaaaaaaggatgttctaaaactgaaaaatacaatatctgaaatgaaaagggaatcagagattgggcaccactgaagaaaagttcaggaaactgaagacagaccataaaactatccaaacacaagcactaactgtaaaagaatgcaaacccaaaaagcatcattcatgtgtaaagtactttaaaatactttaatactcatcccatagatccagtaatctcaaagaattaggataaacacagaaaagaacatgtggggcatgtcactgtcaaatggcaacaacccaaaaataaagagaaaagtcctaaaagcacttagattaaaaagatacattatatacaggaaaaatgtaacaaatggcttcacttgcagaaggtgataaaacaacattttaaatagctgagataaaatgtcaatgtagaattcaatgcattgcaaaaataatccttcaaaaataaagagaagataaaaatatttttgttaaacaaagcttgacagaatttgtcacccacagacttaaagctcaatcaataataaagttctttaggagaaataggtgccacttaggaattcgaatgtatttgaagaaataatgaataggaatggttaacatgtaattaaatataaaatatgcttttatccttcttaatttaaaaaaatgactttaacgcaaatagtaataacaatgcctgttgaggtttataacatatttagaagtaactaatatgataaagtaacacaaaatagaaaagaagtgatgagaaatatattgtcattagattcttatattatataagaagtgacagaatatagttttgaagtagatagtgataaggtaaagatgtatactatgacccttagaacaacaattaaaattaaaataataaataaaggatatgtatttaattagataatatatgagataaagtggatttctaaagccacatgaataatacaacagaatgcaatttatttaatgagtcagtacacccttgataccaaatggtgggaaaaaagaagaaataaatagcaaatggtattactactatagaaaacaaataacaggattaaagacttaaacccaatgataattaataattatattaacgcaaatgcaaatactatatactatgtatatactatatacatttcaattaacagatcgataacatgcaacctgccaaaaatagagaacaaaccctcagcccccaatatggcaccatttcactaggagactgaacagacgctcaacagcaatttgaccacattagaccccttcactctgaaagggacggtgattaatcttgactcaaactgacatatattctgtagatagtgttgccttttctgcttcacaagacctcagccagcaccaacatctaagagtttagtgttagatttataagcacaaaaattgcatgaaaccaagggatttattttatagcaacacgtatggcaattagcacacaacaatgggatccactggtcctaataatgcaggcaccaccactcagaatctgtcagactgaccttccagtaaggtggcgtgctgaagttgcagctgaggtaccagctcagatatgatactatgtgaggatgagtatcatgctcaaggatgaaatatatactcttagtttgcaactaatatatggtgttatgtcttcaactgagagaaatcatggatccagaaaccaaaatgtgaatgtaaaagtggtcttggttactatcatttttttaaatccatattcatggtgccttcaacactgcactctgaaaaggtctttgtaaatcctagttatccaaatggttaacatttccaattaatgacccaaaaagagtctcaacagattttattctttggctattgcctgtgcactctgaacttcagcaaagaaactagcagaaacacagaagattcaatgacctgaagtgggtaattgtccctgattatcacagagatagtgctgctgttacaaaattgaggaataagtttggcactcagatgacacacttgaacattttttctgcctcctttgcacattacctgttagtggagtgtagcagccacatcttaagaaggtcatgatgatcaggtcttcagctatctgagatatgaggttcttggtcttaccctaggtaaacctcctaaatgagcagagttgctatccaattgtgaatggactcttgaatggctaatagacagtagagataatgagtatcctttgtggccaagagaacagcttcagtggtagaggctatagttcatcccactaaaattcattttacaaatttcccctgggaaataaggcccaccagagtcctgatggattttttcaagaaatcctatgaagtaagtggacccaagaggcacaaataatgaaatatagtggatggagtcctgtgcatcctagtactccagcaccctagccctctagttctgaaagaattattctcctaactgctggaaggggtgttggcagataggtttcatatatgagctctctctgccaattactctcagctaaagagagtcatttcacgtaaggctatatcttctctcagtacagtctgaaaccaaccactacttaatacagagtcataacagtccagtttctttgcttcgattcagcatcttaaagggtaattctggattttgatattcttatcagataaactgacacatttgttgtgactgcattttatcacaacttctcctaactaaacccactaccaacactttcatggtaggtagatagttatcccaagagagaactctgcaataaattttctgaaagccaatgtgtctcagaatctaacctgtaatgccaacacatgaaaaccacaaaatctttgctgaaaataaattaaagaatacctaaataagttggaaaatatattcctaaagcacaaggcacaaaattgctaagatgtcaaatataccccaaagtgtcctttgtattcaatacaagcccattaaaattttatagttgtttttgtggaatttgacaaagatgttaaattgtatatggaaataataagtatgtagatgattctcaaaagcaatctttatgaagacaaatttggagtatttacaatacttgcctttaagacatagaacaaggtacattaagacaatttagactgctggaaagaaaaatgaatatatttaataaacccaaagagttttcttagaaatatacccaaaatgtacaattaattaatcttttaaaagaactccaaaaaataatattttaattaatcttttaaaagaacaccaaagaattaatcttttaattaattgatcttttaaaagaacaccaaattacatttagttagaaatgaaaatctttccaccaaatggtgccaaaataggcaaacacaaacattcatatggacaaaagttgaacactgacccctccaccagtactttttcacacaaaaacgttaattcaaagtaggtcctatatctaaatgtacacaccaaaatcataaggcttatacaagaaatcattagataatatctccaagctctttaagtctattagatagaacagaaaatctgtggaccatgaaaacaactaataaatatgatcccatcaaaaatttaagaagctccttctccaaaaacatctgctctttaaacagtgaaaaggcaaagccacagcctgcagaaaatattcagaacatttctatctggcaaaggacttgtacccaggatatataaagacctcttacaactcagtgagaacaacacaagaaccaaaattacttagatgggcataagacttgaatagaaacctcacaatgaagataaggaagatatacgaaggcaaacaagcataagaaaaggtattatgtgtcattaatcatcaaagaaatgcaaatcaaaccacagtgaaatgtttgacaacctgaaatataggctatttggagtgctatggcttgaatgtttgtgtctccccaaaatttgtattttgaaacgtaattatcaatgtgattgtgtgaggaggtagtgcctttaagaggtgatttggtcatgatggcagaacccccgtgaatgggattaattccctgattaagaagactccaggaatctcctttgccccttccaccatgggaggacacagctagatgatgccgtctatgaaccagaaagcaagctctcatcaaacactgaatctgctgaacccttgatcttggacctgccagcctctagaactttgagaaataaatttctgttttttaataagccacctgatctaaggtattttgttatagcagcctaaattgactaagacatggaacaaccataatttttatacatggcaggtagaacactggcaatttcttataaaattaaacctccactggccctataatttgtggttccattctttggtatttaatgaagtaaataaaaacatatatcaactaaaagtttctagaagaatatttgtaggacccttattctttgtagctcaaagctcaaaacaacacagatgttcctcaacagaaaaatgaataaacaaatatttgtgtaatggaatattactcagtaacaaaaagaatgaactatgatacatgcaagaacttagataattccaaaaatattttatttatattaatttctagaacagaacaaattcatcattataagaatcaggtaacaatcgcctctgaggaattaattgactgggaagtgaagggaagaacatttctgggttgatagaaatgttctatcttgataggaatgtggataacacagttgtatgtatttgtaatacactctagaaatatatacatttgtcttatcatacacaatgcactatagattagtggattactgtattccactgtataaaatttttacctcaaaaaataagtagaattatatatcaggaagctactaacaggcagcacatggcagaatttctgggaggtcagaagcaaattacaaattggttgtttgtagtgactacacaactcagttttgtcttctcttcctccttatagaatgtttctctttttcttgtcagttagcagataaatatttaatgagcgtccattatattctaggcaccataatctcagtttctctacatctgacatgtcatggcagctagctagctagttagttaagttataaatttgaaattaatgttcccttttctttataatttttaagaatgtgggaaaaattgatataaaaaaacagctgttggaaaattttctgtcagtgatgaactggtggtggggaaagtttttgtttgggaaattcttagtcctcatgaaaaaattgaaggtttgtattcttcaagttgaatcttttccaactctcaaagagtttcatggaaatacacacacactaaaaggacaaattcagggtagagttttactttactgtatcttgtagatcatgccttgctggctgtttaagcatcatctgaagagtttgataaatatgcagatttttgagtcctaattttggaaattctattttagcaaagctatacagccaggttcttaaaatatcattatagacaaccgggttctagaaatacatacacaaaaactctatgaggaagagacagtatatacgagggatcatcataggcaaaatgaaaaaaaaaaaagatggctgtatgagtgattccccttacacctccctcttggttctaattttgtcttcaccacagcctccaggggcacagagttggctctgtgttacaagacccagaaataagcaaaacccctttcccaccttgcaagcggcaagttattttcaaattttagctttttctttgctaagaacccaggagaaagtaaaagaaaatgcaaaattagaaaaggcttagcctaataaaatacagatttctgagccaaacatagtcaaattgaaaccataagttagctggtccaatttactgacattcaggtcagtttgctcaacttcctccaacacattctactgattagagattcatctgggtttaggggtaaaaaaccaaaaacctccatttaaacttataaattacttctcaggaaggttaagttgatcataaattttagtcagataatcttatgtttttttgttttggtttggtttttgtttctatctaatacaaagctacaaaaatgatggacatttaagggatgggagaagaactgaaattacaatttttgagcaagaaacatagggaaacaagtcagcatctgaacttttagcagctccttgcatgcgcatgctgcaggccccaagtgcccttcacaaatcaatcaatccttcttttatcactcagagtttctctctaggtccccaccttcagaaactatccctctattctcctggcttttttcttctctttgcgtggtcccctctgaaccttgactcaattggccaatccttgacttggccataccttactcttctgtaggttccctcccatttgattgtcttcaatccctacactctggcttcttccctcatcttgatctagactcaaaaacactgcccctatgctccggggctccttcttctctgaaagttgacatcaaatgcatgaggggataaatgtagaattcaatgccctgatatggtcagaagccctatcagggcattgagaatagataaatattatttatctgtttacacattttcacacaattttggccctatgctatggacttctcactctacagtctaggttcagcactatctctttcattctcttattttttcttgaaaatgaatatcatgacctatgactcccaatagctatcttcctattgctgatagaattatttgctgacaaattatttggatgactttacatccaaagcatatgttttctttttccagcctcttacacattgccatctggtgtctgttcctgccttatctccatctacatgatctcttagacctctttgatgcattaaaaaatataaagcctgctttattaaagaccatgaaaccctttcagtaaacttacctccttcctagtttgcttaaaccaagtggagcaggattatattatgaagaaaagtagtaccagtaagactaggtacaaattggaaagcagctgccctcccaattcaaggtaacatacttttattgtggcctttctgtgtcccagagattttgtttaaatgctagataaacaagttaggggaaaaagataaattgttgaattcttgaatgattgagaaattcttgaatgattgagaatttcttgaaaagaacatgaaattctaaggaaagctttatctgggtgaacctgagttctaaaactccatttgcaaagacctaacagaaatatcttgccataatcttaatatcaacaaaactaaactcactagtctatttttaattgtccctgaaaaacgacattttatgtttcagtcatccagctcccttattaatacttttattccttttttacattgcttcatgtacaatcaacaagcttttccttttttgaggtctacatactggactgttaatacctgtcatagaatttatttattgagctgaattttgcttcataagcctacataacaatgctatggcatcattaatgttggaaaactaaaatttaagataaaatcaatagaaaatactaattgggatagttcatgttgaaaaaggaaaaattctgcctatgaaaaaaattaaagaattgtaaaactttttgaacctaacaaaggggaaattaacatttttacaattataataaaaaatttaagcatacttttccccaaaactaacataaaataaaccaaaacccagcaagacaaagaaaaatttgcataacataaataatacagtatttaaaaggtaacgtatattcagttgtaacccacttgcaatatttaccaaaaaaataaaaatacagaggttacaaagcaatgctctcaaagtgaaaatgaataaaaccatttcatgcatactgactatatttactactaaagcaaagaaatcataaaattcaataacctttcaagtgaaacaaaccaaatcaaaacaaaaaaatattttagcaaactggaaggataataaaactcttttattctgatactgcatgttaattggaagcccatcatgaatatcatccttcaaactgctaataaataacattacacactttcctgctaaagtcagaaagttataatttatgttattactactactatctatcactatactataggtcttagccaatgcaataagaggtttttttagaaaattagattggaaagacagaattttaagctattatgaatagttgtaagagggaaaactagagtatttataatagtaccaataagggaatttagcaatatacccagattgaaatacaatgtataaacattaatagcttttctaaatcctgccaatgtaagacaggaacaattattttcaaaataataacagcaaatataaaatacttaagattataccttataacaaagatttcaaaataatgagtaaagtgttcacctcatagcagataaaactcaggagggtaaattatcagcaaatgactttaaaagatacactaaaatctatgaaattaaaaaatcaaagataaccaaaaagttaagctgagttctttgaaaagtttaaattaataatgcaaaaatgaggtaacactgatatagaaaaaataagagaatgcttaaataaaatactaagaatgagaaagagatatagctagagatggaatagacattttaaaatcacaagagactattttgacttctaaagagaaaattgtagaagtttactcaatagcataatcactcctgaataaatgaagagagatcgttgcggatgagaagtctcgacatgtttttttttcttatttaatataaaaattctttgcaatgtaaatcaatatccaataggattttatagcattttgtaggctgattataaatttcatgtaaaagatacattttcaggaatagataatagctgtctgaagatgaacagaaaggaaaacatgtcctaccagatgtaaaatcttaaaaagcatatgtcttaaagaactgcaatgttgacataggataggcaacaaaatctgtaaaactaaatgtaacattcagaaggggacctgtaggaataattgaatatttagaaaaaaatgacatttcaaatcagcgaagaaaagaaaaacaactcaataaatggtcttagagttttgggataaatatttagaaagataagttaaatttcattttacagtcatcacaaaaaataaattctagattaatccaataaacataaaagaaagttctacagggttataagaaaatatagcacaatgctttctttggtgcaatgtggggcagttaggtaaataagacaacaaagccaaatttataaataaaaatattgatgcattaactaaatcaaaattaatagcaggagttccattgctaaatgatatttaaatgtcactagtaaagctaaatggtaagcaaacacagagaaaatatttgtaatttttatgatgctaaagcatcgaaagcagtacttttcaaactctccatggtggagggccaacttttttttctatttttaatcttttatgggccaatacatttatataatacaataaaaatgaattaccagaaaaataaaattaaaagaacatataacatgtaagtccttttcttacatgagattgaatagtaataaaattactcagtccacctactttcaatttctctgcctaccttgtagtggaccagcaataacccatcggtggagcaacacagatccactgaagacaccatgagctaagcggatcataagatgtcccacaaatcagtatgaaaatggcaaaaaatcaaacacaaaaacacgtaatttttacttcatcttatgctctggggagaaaattgcacacatgcagcaagagatactcataaggatatccatatcatgattgtttataaaagcaagaaattgaaggaaaaagtccatctcctaatccttgctctaaaaaacacttcagtatttaactctgctgtcactttcctggtctaagtgagctcctgaaataacctaactctaacgctaacccttacataaatgtctgctgctcttccaccatccagtctttccctacgcattagctagagtcttctctcagcatgtaaacaggatgcctcacactctcctgaaaaccttcagtggtttcattttacactgacattaaaattcaaattatttacaactccttgtgtcttctggcctctgcctgcctcttacatttgatctttaagccatgctttcctttactaactattccccatatacactgacctttcagtttctgctctgaaattctgttcctcgcattttatcctggctagttccttcacatgcttttgtcctcaaactcaaatgtcattgctttatattgctttccattgacccaaccaatccaaattaggcatatctctacagcctgcttttctttataaaactcagttcttttctacattcggttttgtgcttcttctgcctcccatactaactacactgggggctacaaaaaagtagagagtgacttctctattcccataacctggctcagtggtcagcagctagcaggtgctcaatatgtattaattaattaaataattgagtaaatgagaaacggaggttaagagaggagctcaaagctaagaaaagaagaaagggattgtgagaggagagaataaagacaaaataatgaagaaaagaaaagaaaagaaaaattgtgttgaatttgaaaaataaaaacaataaagataaatttggaaaaattatagtactcgacttagttaacagcaatgaaaatattttgtagataaatatgtcatgtcataattccataactgcccttctttcagaattataaagacaagatagcatcctaaaatcttttttctaaatatataactattcctactatatcatacatcaatacattatttaaatacaaaaaaattgatttatttgcatcgtactttctcacagtagaataaatggaattttacattctctaggaacttttttgaaccactcaaagaatttcactttcttggatgtgaggtgagaccaggtggttcctgagtagatttaaaaaaatgctagaaaagaataaaaagagagaagaaaccagaaacttgagtttgtaatttacttgtgaaatgatataaataatggtaatgtgccctgttgttcccgcaggcaccatttggagcctgagaatggagacccaaataattgttctttgtgggcacataaagtgagtttttcttccttacccgtctttttgttgtgtatctatcagtcagtgttcagttgcaggtaaagaaaagaatctactctagctagtttaaacagaaagggtttatttaagggcattaaatatcacacaggatcattaggagaactaaagatcctaattcttgtttgagttttcaggaatcattcatgaggctacattgcaaaattgggctatcaagggagctacagttcctgccacagtcctgtaaaaggagaaaactgcatgtgaaatcagaaaaatgttgctacaaccttttatcaattccagaaccacattgcatttatcatggataccatggatttgataccctgactccctagtcacatgactgtgtgaaataaaaattttgtgctggttcatcttatcaaaagactataaatcatatctagaacactagccacaataatgtcgaggaaatgttgtttgttgtttatttttgtttgtttcatacgctaaaagggtgttggaatgcctgttgagcaagtcatttatagtacctgtcatatacaggatgtgcacctgttcctttctaccagttaagtgagaatagatatgtgaattaagatagtaacagtgaggatatggaaattctaagagatatttaatatgtttctgtttgggctaataagaaaatgtaggtattattttagagattcaggtggatcctatatatcgttattgaactacgttattgattaaaataccaataatttcttggatttttacagaaaatatgaagcttctaacaagttagtttaaaataattaagccttgactctattgatgctttgagtcagataattctttcttgtaggaggctaccctgagtattgtgtgtaggtatttagcagcacaaatggcctctacctactaaatgtctataccacgtcttttcttcagatgtgacaataaaaaatgtcccagatgttgccaagtgcatgattgtgtccaggtttgagtcactagtttagatgatcacataaggggaagagtccaaatcttgcttttaaaaaatagaaacgaaaaataacaacttccagaatacataactatttcttttattataattttctgtttttcaattttagaagtatattttctgttttttttgtttgtttgttttgttttttgagacggagttttgctcttattgcccaggctggtgtgcaatggtgcgaccttggctcactgcaacctctgcctccagatacaagctattctcttgcttcagccctcccgagtaactgggattacaaatgtccgcaacctcacttggctaattttttgtatgtttagtagagacagggtttcaccatgttggccaggttggtcttgaactcctgaattcaggcggtccacccacctcggcctgtcaaaggctgggattacaggtgtagccaccacgtccggcctagaagtataagtatatatatacatttttttttttttttttgagacggagtctcgctctgtctcccaggctggagtgcagtggcgcgatctcggctcactgcaagctccgccttccaggttcacgccattctcctgcctcagcttcccgagtagctgggactacaggcgcccgccaacaggcccagctaatttttttgtatttttagtagagatggggtttcaccgtgttagccaggatgctctcaatctcctgacctcgtgatctgccccctcggcctcccaaagtgctgggattacaggcgtgagccaccatggccggctggatatcctattttctatacgtttaaaaattatataatttttatatttcgttaatatttttaatttattgcattttcccatttttattgcttaatttcatttttaatattcattacttaatttcagcaggttttataatttcaagaaactaaaattatcacttacttgtaaatataccccactttctcacaaaaataaatctagaaatctagacattagaaaaacatggtgaaacacttattctatttctcacaaatgtgggaaaaatatttattcattaatatcacctttgctgtagtagtgacaatgaggtaaattgtatttctaattccatcttctgttgttagttccaagtcaggatctttctctatccttaaaaaactgagattgaggctctcaaagttttctgcctcaaattcctttaattagtgataatggccccagatggctgggtatttttcgtggaatgagggggtttcgaaacaagtttcagtcaggtgcagtggctcacgtctgtactcccagcactttaggatgctgaggtgggcagatcacttgagctcaggagttgaagactagccagggcaacatagggagatcccgtttctgcaaaaactaataataataaaaagcccggagtagtggttcctgcctgtactgccagctactcaggaggctaaggtcggagaattgcttgcccagggaggtctaggctgcagtgagccgtgatcacgccactgcccttcagccagagcaacagagtgagactctgtctcaagaaaaaaaggaagagaaagaatgaacgaaacaagctcctccatgaaagggttttcagtttctcgactgtggttgcatgtgacagtgtcttcaatatcacatactaatgtctagaactcatccatagagaatttgatttaatatgcctgagtggggctggccataggtattattttagacctctctggatgagtctaataattgagaaacattgctggaaggaaatactgttcaactatgatcaagctatatatagtttttgaaaaactctcagataattttcatatatcatttttaaatggacatgttcttaacagttacaaagcacatcctgaaaattaattattcatgatccaagagtcagtttctctctctctctctctcttttgctcattctttctctctctctccctgcttcctctgcttcacctcagaaacgcttaacaggtacctcccaatgcagagttgggaagattttgtgtggaataggatgctttctttaacattagaactaaatctggaaaaacgatgtccagtgtcattttcaactggaaattttctgaaagaatatggagccaacagacaaacctgtggtgaggaagatagctttacgtgagtcttcccattcacaaatccatccaagacactgcattctttctgccttactagcttatgtagcctagacagtaaaggtcactctgagagcccaactttactagctgctatgccagctcccaatcccattttatgtttgctccagattacaaaactacttccttgcagcgttgtatgactacaaaaatttggttaatatttctgcatcttttatctcatccataagatgaagtaaatagacttgagaggctttaaaatctactcttgctccaataatttatttccttctttgcaagacatttggcaaagtgtttaattactgttaggagctttaaaactccaacggtatattttaaattaaataaaaatgttttggatatttctttgttttcagtcaatcatgaaccctcctcttctctttctcttctgttttttcttggcatttcctcttctgagatcgataaggtgatagattattatctttctatagacagaaattgatgggctaagtgtgaagcacagaagatagggaataacaaattaagtaatagagaaaagagagaggaggaagtgagatcatagatccaaatgctcatgacttttaaagatgggaacctgtgataatgaggtgtcagcaaggtaaactaggtaagtactaaacttagaggattctggttacatcgatcggccttgtagtttgtaagtatattgcatactttctaccagtccccaaccacagaaggctgccacatactctccttctcctttgacaactccccttaggccttctcctcctacagagagtcatgagttataaccccaaagcccctgcacagacgtctctcacccccactgtgggcaggtgccatcattcaaaatatacacagattccatggagaaaacatattatgacagcatcacaatcgatctccttactcctcaagaagttatatccaagtgacctatattcatgtacaaattaggtcagatgggaaaatgaaaagtagttacaataaatcacacagtaaacacaggagttcataaataaataaaacccgtgataggaaactcagagttgaaataagaatgcctaataaatgaaaaagaaaagaataaaagttacaatcataatataatataaaactttgggaaaactggtgtgaaaaattttttaatatctgtaaatatacctttgccctggataaactaaatgagggaggttgcaaagggtaactaagtgacagatattacctaaatttagggattgaataattctgtattgactgaatctttaaaaagtaaagtaatagcaatagtaaaaaaaaaaaagaaagaaagaaagtaatagtagtatagcaaaaaaagttccaatgtgtacaagcaaaaaaaaaaaatcccttattttagcctttcttagtttccagtagtaaccactgttacaaactgttgtgattatatataaacacacagacacacatatgtatatacacacatatatatttcaaatatgtttatatttcacatatagttataaatatagagctatatttgcatgtataaatgctcatatacttttgacacaaatgggttcaaattttacatctttatgcacattcccctatttatttttccactagttacagtcctacttcctggtgctaggcttggctccaacacttaatacttgcatgatcttaaaatgtgcttgttgctcaaattctctgtgcctcagtttctcaataaacaatggagataatagtaatacttgacacttaaagttgctattaagattaaatgtactacattacaagtcttagaatagtgttcaaacatcagaagtgctgtggaactgttagcttttatttttattgtcatcatcaatatcatcttcatcattatacatagtggatggtgtggtactttgcccagatcccctcttcatgttacttctgatgacttaccaccatgccccttactggtaatcacccttcaccacagggaacagccatgcacaaagttatgttcacattccagggtacattccatagccaaagactggctgatgtgggaatacaaatgctcagctgccctagccacagtgtgggtaattctgagggccatcccagattcagaactcttttgtaggattatgagacaactttctttgctcaatcctattttctacattcactttatacgtatacatgtaaattctgaaactaccaacaataaatgtgcttcatgaaatttactatctcagagtttatttccaaggaacccccaaatctaaaacaattggttccagaggtaaccctaggggacctgttcttttgtgttgtttttgttttgagacagggtcttgctttgtcactcaggatggagtgcagcggtgtgaagccagttcactgtatcctccatctcccaggttcaagaaatcctcccatctcagcctcctgtgtagctgggactacagatgtgcagcaccaagcctggctaattgtttcttattttttgtagagacaaggtctcactatgttggtcagtgtggtctcaaactcctaggctcacgggatcctcctgccttggcctcccaaaatgctgggattatgagcatgcgctaccatgcctggccaagggggcatactctaatataaaactttttatttgtattaccactgatcaagcagtactgaagacactgcaacttgtggatggtggtgtatggatagcctgtactgtgttgtaccgtttggtgttaaaactttcactggtgatgaacgggatgtgatacctgtgaaaggtgatgcaccacctagtgcaatttctcttggttgtgtgatatatgagaaaaatggtaattacaaggttaatgaaactgggtgactactgttgatttccactgagtagtttagagagatgaatatagcttagcatgattaatcaaccattcaaggcagagtgtgaatgactacgagtagcttgtaagtggctacatttaagaaaaccctaatctcctgtagctggaaggcagggagaataaaagaccactctcagggcttaagtaaaagtggaacttcagagaaagttgatgtcttagtcccagaagatctcctacaccaaggaatttatcttctagttctggaaggaatgggacttgagaattgtaatggtgacatctaaatgggtacatttgagaatcttaaacacccaaattcccttaacctttctgggtttgccaaagcagcctcctcctccctgttagttgacaacagtgctcccttttcttcctctcacctgccgcactgacttgagatcatgcagaagtctcatataaatcagagacattataagacaatgcttactccttcagaatatcctaacatccatacctctaataaggaccaaattccagcacagtctagttagggagtcatcatgcattctcttctttcttctttcttctttcttcttccttcttccttcttccttcttccttcttccttcttccttcttccttcttcttcttcttcttcttcttcttcttctcctcctcctcctcctccttctccttctcctcctcctcctccttcttcttcttattttcttttctttttcttttttgacagaatctcacttttttcacccaggctaaagtggagtggcacgattttggctcacttcagtcttgaccgcctggactcaagtgatcctcccgcctcaacccctaagtaactgggactacagatgtgtgccaccactcctggctaatttttgtatttttttgtagaaagggggtttcgccatgttgcccaggctggtctcaaactcctgatctcaattgatccaccaacctcggcctcccaaagtactaggatgtcaggcatgagccactgcacccggccacattctaaggaagataagaacactgtactgaagttgctgaaagatctggctaatatgttttggtaggagtaggtatgtaactgggtcctgagggttctggatcaaaggggcaaaaaataaagttgaagatgaaagaaacacgtatgaatataggtccagtctatagatcttaataccatgtcaagcaccactggagatggtctttgctaggaaggtctttgaaagctaggagaaagtaatgattcataaaaatgggggaaaatgctagaaaatattatgacaaatagagaaggagggggtcaaaagacaaaaacagagcatgctattatagaacggatactatctaaggtcagaaaactctacagaccacaatgttcattggaatggtccagaggatacttcatttattacagcaatagggattgtgctgatgagagggatagtggcattgctgagaagctgagtggtggggatcacctgtaggtcagggtaaaaggaggagaagctgtcacagaactaaacttcctgataataatgaagataacaggattgtgaaaaaccagtgttagggcagtgccatgaactgtcagaagcatggcgcatgcaatcattgcattaagtgagaagattgaaatagtagccaggggggctgatcagcaaagctatgaatatggcaaatgaaacatagtatccctagaaatactgacaagaaatacatgcttaggttttgtttaaggaatcaaaactatatgtatgttcaggagctggtgggtggaagccccaacaaaaatcatgatctcttatcaaagccacagtgcatagaacacgacagcaaacatattcagtagtaatttcttccatctttcccaaaagggacctatggccatttgctcaggcaatcatgtaaattaagtctgaattgacattggtattcagggacccaagcaccactattgcaccctgtaaagagtaggggtgtgggaggtgccagatgataactaaaatattggcccatatgaggattaagtgatccactgggtccacagacttgtccagtgataatttgcccagtccctgaatgcataattggaatagacatactgattattagcaaaacctgcacactggttacttgatctgtgaaataactctcttaagaaagacaactggaaacttctaaaagtgtgacacttcttttcaaaacaatacaacattacagaggaaattcagaaattagtgctaccctcaaaaacttaaagaatgcaacttgtggctcctttcataccacaatttaattcaccagattgactctttaaaaaaaaaaacaacaacaacaaaagatgaaccgtaacagatgaccatggattattgaaaactgacccaaggagtactccaattttcagcctctgccatattgttgatagagcagattaacatagactctagctacagaatgtggccattgactgcacctgcattcttttctatcccaataaagaaggagatcaagaagaagatcattttcatgtaggatgaacaacagtacacattttctgtcttggccaagagcaatattaattttccctccctctgacataatatagtctgaaagaactagaccatcaagggcatctagcagaatatcacacaggtccactaaatagatgacatcatgctagtcaaaccaagtgagacaaaactggcaagtacattggaaacattaagacatacgtgccagagaggacaggagataaaccctcctaagatgcaggggccctccacaccagtaaagaagtttttaggattccagaggactggaaaatgccaagacattctctctaaagtaaaaaataaatgattttctcttaaaacttctaccactcagaagcaacacgataattgacaggcctctttggagtctttggaatataaaagaagtaaatttaacaatttagaatactgtttcaatactaaaaaaagaaataaaaataaaacaaaagaatactgtttcaatccatttactggatgacatagaagcctgctggtattgcgtggactcatcctaatacagatacagaaaggagtctgtatctgtattaggtgttcttgctttgctaatgtgagatatatatacatatatctgatatatatatctggctcatatatatcagatattatagatatagatagatagagatatagatatagatacagatatatagatatagatatatatcagaggccagtcacaatggctcatgcctgtaatcccagcactttgggaggccaaggcgggggaatcacttgaagtcaggagtttgagaccagcctggccaacatggtgaaacctcatctctactaaaaatacaaaaattagctgcacgtggtggtgcacacctgtaatcccagctgctctggaggctgaggcatgataattgcttgaacccaggaggcggaggttgcagtgagccgagatcaggccactgtactccaatctgagcaacagagtgaaattgtctcaaacaacaacaacaaaacctgactgggtaattaataaagaaaggaggtttaattggctcacagttcttctggctgtacaggaaacaagatgctgacatctacttggcttctggggaggtcttaggaaacttacaatcatggcagaaggcgaagggaaagcaagcacatcacatggtgaaagcagaatcaaaagtgagggaggaaggtgccatgcaatttcagcaactagatctcaaaagaactcattcactgtcatgagaatagcaccatgaggatggagttaaactatttatgagaaatctgtcctcataatccaatcacctcccaccaggccccacctccaacattggggattacaattcaacatgagatttgggcgagacacacatccaaactgtatcagcatcagaccaagactgcagttcaaacagcccttccacttggaacacattaactagaagaccatggtactagaggttatctgtggtggaaaaaaaaatctgtcatatgaagtttacatccagcttttatagaaaatcacaatcatatgctctgtaaaacccaccgctatggtctgaatatgttgccccaaaattcatgttgaaatcctaaccccaagatgatggtattaggagttggagccttttagaaggtgattaggtcacaagagtggggttgtcatgaatgaaattagtaccgttatgaaacaggcccaggaggcttattcatcctttccatcatgtgagggcacagtgagaagtcactatctataaagtaggaaatgggctgtctccagacactgaatctggacattccagaacagggagaaataattttctgttgtttataaaccattcagttaatggtattttgttatagtagctcaaatggactaagacatacaccaagtaataagacagataagactttgtaacattgataaatcagagattgggcaaaaagaaagccaaagggcatgaataaagtgtgaaaagaggaataaacaatgtaagaatacacattcatgggcagtggttcatctgattttttcagggtcttgaaaagagacaaattgtaagactggggacaagaagttctgatgaagtggtaagagactgcgtaaaagaggaaattacgtgtgaatacttttatgccatttgtcaattctttccagagagcatctactattaaagactctaaagaatcaagtggacaatatatgtcattaccagtttacatcagccaatccctgttatcagccactgtgtttaaacaataggtgtatgaacaagtggccaagacagcatagagggtatgcatagaccccatgcgatgggctcccctaaacaattctatcttatctagctactgtccctgctgaatacccaatgtgccagcaacagagaccaaagctgagtctccgtattattggatggctgagaccacccaatcatctactttatggcaagttgactaccctggaagcaacagaaaatcaccgtgccttgtattgacaaacattttttattacatgtttattttttctcctcagagggctacatttaatatgagttttgaggacttccagagtatttagccaccaaaatgggaccccatatagcattgcccagagtttaaaaaataaaaaatactgcattagaataaaagtggtgtataaatagacacacagctgtggggtctacttattttgtcacacattgcacaacccagaatttgtcaatctgatagtttggcatgtttgcttctttaaaacacagctaagattccatctgtaagttgatactctctacctgaaaaaccctcatcctggatcaaccttattactttcatatttagcatttgcaattaagctgtggaaagacagtgcagaataggacaattttgtttcattataaattcacaatcaccatagaaaaggaactcttaagatagcacaaaaacttctggtcaattttatctcctaaaaatatctctttgtccattcttttcttatgccctttaatccatactcaaagttttcattaccacctgtacatagaagactctcaacttttattcctagctcaagatccacatatacgatggtgtcttcaacatctccacttaggtagctcaatgtagcaagattttatatccatgcttttccttcctgctggccctcagtctggtcttctgtgttttcttttactccaaacaacatcaccacgtatatgccgatgaaaaacccatatatgcttgaaatttgcctttttatcacctatcatatctaatctattacaattcttttaaaattatacatttttgtctccctggaacacctactatctttttccactgcagcaatttatgtgaagtcacaaaacattagcgtgctggtactcagtgcagtattaatgagttattacctcataaaattaaagatgagcacgtttcactcttcttaggaaatgtctcgcagaataatttgggggtaaacactcatttggggtggaaaggagtcatattacataaacaaaataaccatttgaaatacatgtgatttccagttgaaaatgtgtatttaaattatggcttcaaagaagatggaactttgatcactttatcttttaaagatgtttatgtttctatatatagttatataaatataaatctagttttatagaagtgatcgctacagcaagtacttttcaggaacgataggctataaaataaatacctcatcaaaaggatttgctcaaagctacaaataaaatcacggcacaattatctctaaagaacccaaatcgaaggtggatgggtgagtgacataagtggcaataattctggtgtgtggaatagtgtaatggcagtaaggctataaaaatatacccaagtgtctgactttatcaaaatgtactttatagaagcttttcatttttatattttaaaatctaaataactcgtttaaagttgttgatttatatgatgccttttttttttttttttttttttgagacagagactcgctcgtcgcccaggctggagtgcagtggcacgatctaggctcactgcaagctctgcctcctgggttcacactattctcttgcctcagcctcccaagtagctaggactacaggtgcccgccaccacaccctgctaaatttttttttttttttttttttttgtatttttagtaaagacggggtttcaccctgttagccaggatggtctcgatctcctgaccttgtgatccgcccgtctcggcctcccaaagtgctgggattacaggggtgaaccatatatgatgcttttataaacatattatttattttagactttcagcagccttggtgacatacatgctttccactttaacgtgttgcctagtactttttttcttaaaatttgagaaaagaataagagcttgatgtaatccctgcttcaacatttttttgctgcataactttgggtaatgttgataacgcatcgcacttctctgagccttggtttccagctgtatagttggaacaatgggaatgctaatgcttacctcaagctggttattgtgagggtaaaaaatgtaaaagattcctaacagtcattacttaggcactcaataagtagtagctctcaatgacattaatattgatcttttgtttttgagcctttgcttatgatcatgggtaaaattatactgtttaattttgcaaagccaaaaaatataatttataggaataaaatgagatcaaagcttaagtagttttattattatctatagaaggcagtggtttctaaggttattttattagacagagataatttgggacatgaatttgaatctattgaatgaagcagtgagagttcaagtgcaacattttatggcagataactgataaatgaaaatttaaattcgggaatgttgaaattgaatagaaccattgggacaacataaaccatgatttttcagaatgtaacacttgagcctaaagaagttaattaatttcacataatcacataacagattagcaaaagagaaagtaaaaaatatatttttaaactccagtcttaggctgtttttaatgctgcataatgaaatgaagagaaaattaatttccaggttatttccttattttataggcagagtgctttggatagaaaatgtctaaattctttttatatcatcacagagatataaatcattggctgtgcttgcaaacatcattctacgtatctgtaagtattcctggagaaacttaggtgttggctaagcttctgggtaaaactttttaactgcactcacttattagttatgacctggaggaaatgcataagcttcattcagcatgctgttccagtgagaatagtcacttcacaatatagatcctgtttgtgtgcttggtgtagaaacatatgtggccatgacccttgccctctaagagtacatggtctaatgaagaggaaacccataaatggatcaatgcaattcaataaagaaggtgcagaaatatgggtataaaggaggtattatgacagtacctagcagcaatatttacctgtggtcaaattactactgactaacagattttctggtcaagaaattgcagaaacaatagccagatgtctatgcagatggtaataagactaccatcaccttaacttgctttcattagcaaaaagggctgttgggaaatagtactctgttttcagaaaaacaaaaatatgtaataacattaccataaccgtgtatcatttctgtatactcctttgagaaaacagagtgagaatctgttttctaaacttccagctagcaagatttatacttccaccttcagaaaacacacccaacttcaatcaaaaaaaggttattttccatacttcctttctttcacaatatgaaaagaaattctaagcaagaacaagaaagaaagtcaggcagctgtttggaccattactgaataatcatggtgctcagcactattgtttccttttaatgttaatttaaaatatgccaggctctgtcaaacacactggtaaatgcagcattttaaggaaactttgggctgaaacacataatattttatttcaaagaaataaaaggaaagcaaccagatgccacattataatttcctgtcggtttgcagggaagtagcagtccattattctggagtagaaaaaaatagtgaatgggatgttctagaacctccctgaatcagttatatctcatgaaatcaccacagtaaacaaatgtaattatttttcctagagccaacattgtagccttcttgcagagatttgtgctctttgtgaggttcttttattatgacaaaataacaataaatgacaccatgtaatagctaataacattgttatgtccctttattattttttcagcatgacgaaatgtaacaaagtattaacattcatctaaatcaaaagataattcatttgaaagttttcaaaattttgttgtttgatattttatcttaattgaagccttttagaatccatcaaaatcagtgtatgtctaagctcttcagtcaatatttttgtcaaaaacattcatttatatgttatacttaacaatcattacattctttataaaaggtatcggtaaaggaattaagtacaaagaaaaaaactggttaaggaagatttgaaccagaaagtaaataggaaatgttttccccaaatgatcttcccttgtatagtcaggatgaacggaagattgggcaaaagacataaatcttaaatttgaaaggaatgaaaaaatacgagggtagaaagcaacacacagcctgagttgaaaatcgggtttgcttttgaaattaagatttgagtaaaaagaaaaataatgccttttcttggataactcagttgttaatttaacaatatgcataaaccatctacatatgctacacggtgttctaatctatgtaggttcaggaaaaaataaaaccccaattcctgctttatggactttatagtatagtgggtggacagagacaataaagaaattgaatacattccactatgtccgggaattataaaaacagcaaaaaaagtgaactccgggaattgagggtctgggtaggagtgtgtagatactgtggtctaggaagacctctctaacgagatactcaaataaagtgagggagtgaggtttgctgatttatgaagtgaatggagattaagagcttcctcttatgggaaccaaagaaatatggaagtttatatgtaacaattttcaaaataggaatcaaatacaaacaaggaacaggtaagaggacatttcagcatttgtcaaaaaatggatatatccatatgactaaataaagatttaaaaattaggctgtgaataaaaattaggttgtggaaaaacaaagttttatagatgtaataatggaattaaattatacatacattaaagtaatatcaaaattaaaatatttctatatatgtacataaacttatatataaataaaaataaaggactatataatatatataaatggaaatgaggcatatttttgtgccttcggagccaatgatcatcttcctaataaggatatcaaaattaattcttgaagaatgtgtgtgctgatttgttttcagactattgttttcctaccctcttgagaaactttaaaatatgttatttttttcatctttaaaaaacatgcagtgtgaggttgagagacagagtagcttgttctcagcagctgtgcaatgctaacatgttgtgaatattcaacaaatattaagtgacattgaaatatgaattgatggataatgaatcactttagggaattattctgccaaaatgttttggaagatctatgaaatgtttgacaaatccaaaagatcttaagctttgcctttgctgagatttatttatttatttatttggagggatggggagacaggttcttatttttcatctggctcattatgtccttctgttagagagtaattcatgttcaaatcatattactttaacttttgttaagcaattgatttctcagtggttatataattggaaaaacagaacatctagaaaaattgcctctttttattaagtagagaaataaaattgattaagcagaaacttaattatagtaatggactgacccagacgtggtgaatgagcaccaggacaagacacaaatgttgcatttagagagtttatacctaacggcattatctttagcattacttaagtaaggggaaaaaatccatagcttataaaataatttttcctctattttcttctgttacatgcaagttaacaggatctttgtctaagatctatatggctattttaacataataattatttaaaaattatctctctttaaataccaagtaattttagcctactctcggctcctttaacatcccagccacatttgttctgtgtatactaatcactgtagttacataaagcttcttataatgcctgtaatatgaaaaattgtatggattagtcaggattcttaaagttgaaaattagaaaagccagcttaaggaaaaagaggtgactgctcattagaatatggggatttataatagtaaagaaaataatgcagccgaacgtcagatagggcaggacgcagcagtaaaagactgttggcaactggatcattctttcacaatttcttgatcctgtttctctctgtgcattggctttatccttctcttttgtcagactgctttttttttcttttttcttctactcaatccacatgatggcagaaaaataaaacagataccgtcatatatggtagaattcaagccatatgaagatatgaactcttttgatcttaattcctaattctcaaggaagtgacttgagcccagacagggtagaatgtacaattattttaagaggccattgcataaatatggcagctaagtgctaactgtatggctatcagtaggtctgaagtggatgtgtgtaattaagtggatcgttgtgagttggaagatattcaacagagtccactatgtcacataagtgaagttctgtctaaaagtgtccttctcaagtactttacttttcatactaactataatttttaggacaacatcttcatggttcaaaatcaatttttcaatctatctcttaaatcatgttaaaagagaaatgatcaacaaagcaattctcctagatatagctataaaatggaaaaaattattaacataattacctgcaggttcaggaaactgaagtatgacaagcagatttgggagtagagacaagacttggggaaaacaatcacgagaacagggtgactgcctcattttttgtgtgttttgttttgcagctttgccctgaatggagccacagtcacagtggcatggtgtagggatagctcaaactctggtagaaagtccactggcttactggctaccagaaatagggcaagaaacagggcaaccagagtctccagagagtgataggagaacatcagaaatgagagagttagaggaagagaaccccaatgtttgcatttaaactccacacagagactggggcacaaactgtgactaaccattcaaccacatattgaatgggaaaaaatggaaaccagctcacagctataattcaaggaattgaattgagatcaaaactgcagcccaccgcagacatacctgtttgcactttgagtctaaccaagttaatctcttgctaaaacaaaagcatcaacactttttggaacaatatacagaatccagattctccacaacctaatattcagaatgtccaggatacagtccaatattattcacatacaaacagccaggaaaatgtgatacagtttcaggggaaaagactataaacagatgacaacagatgaggttagcagatgttgaaattattagacaagtatttaaagaagcagttataatttttcacagtgacataaagaatatagacttgcattgagtgaaataatatatctgcaaatatttaaaaaattgaaaattttagagctaaagatcttagtatttaaaataaaaaatccactgggtaggcttaagaggctactggaaatggagataaaagggtcagtaaatctgaaaacatattaaaaggaagcaaccaatataaagaatggtaatcccccccaacatacttattaatttcaaagggaaaagggtagctttatagtggggagacagtaagccacaacttaacaaagtgattgagttgatatcaccagtaatgagacatagtgataccttctgccttctaatatgatacactggaaagggtacagtgttacttctatggtttcctttataaaaatgaataactgaatttaacacggggaaacatcagacaaaccaaagttgagaaatattctacataacaactggccagtacttttcaaacgtgtcaagggcatgaataataaagactgaagacctcttccagaatgagagattaactgcagtgtatggccctgtattgaatggtgagtcagaaagagaacactatagggcaaaagatgaaacttgaataaagcctacacattagttggtagtgtgttatcaatgttactagtgagattttgcaaattgtatgtgcttatgaatgtattgttaagaaattcattttctttaaataaatttgtaattctaatgcaatctaactcaaaaccccagcatgtttttttttgcagaaattgacaagttgattcaaaaatttatgtaaaaaccaaatgaacaagaatagactcttttaaaaaagagaaaaaatggcggaacttaaatgatctcattttatgacttactacaaataaatagtaataaaagagggtggtattggagaaaaaaatagacagataaataaatggaagacaatagatagcccagaaatagttccaaatataactggctgattgatttttgaaaaaagtattaaagaatttcaatgggggaaagaaatgctgtttccaaaatgatgttgcaacaacttgatatttatatggaataaaatagacattgaattttacctaacactgtatacaacttttagctaaaagaatttcataattactatcaaaactaggaaactcctaaaagaaataaaggaaaaagttatttgtcttcttgagatgagccaatatgtcttccatggaatacaaaatgcttgaataatttttttcagaaaggatcaattagacttgatcaaagttaagacatgaagcttcataatggggatcaagtatatatttatataaccagggagtcctcatcctccaccccgactttcttcataatgtttttcatctttaaggcctaattatacaaaaatccaatttggtaggtactgccaaagcaatttttgcttgtaattgacaagaagtaatgtttcatgagctacatttacctgtatgttgggttgctttatattcacttctgtctaagctgaatgtttaggaaggttactttctactcaatacacataacattctcactaaagttaaaccatatgggagtcatttccactgaacatataaagactggaaggagacaaaaagcaataaatttcctattttctttcatttgagggcttagcatgaccaaggcacctgttttgtggtaagacaaaggctcaaaagtgaagtgtggaaaaagttttcaaaaaatgggagaggtggctctctgaactggaaaacctggaaatgtgatagctaataatctcaggatggtctaagctaatattagtagcatgtaaacctaaattaggcctttctacagcggacttatgctcctgagaaaacatttctagcaaatggcaacatgttgaacaaaaaaatcccccattacatctctgacactctcacagtatttgtcaattattcagctcgacagcaactcacaaagcttttgcacaagcagtttttcaaagttttgaaattcttgtggatgtggatgtaattctcatttttgactctttatgttaaaacaccagaacacaggaacttctatttttaaataaacacaatttagatgtcacagatcctgctgtgtatttcttaaagttgtcttttcctttttggttaaaagctttatgctgttttcctaagagcaaacctatcccaatattaaaaggttccaattagaaatgaaactccaaagccatgaattttgagagggctctgaacttgccaaaacaatttcttgtaagacttgataacttggattacacactcccactgcatatttaaaagcctttactataaaggttcctataacaaaagggagacaaaaagatactataattattcatggaacatattcaagccatcattgctgatgaaatatgatatctacaacattcctctactgtaaataaggcagtgattcagagtagtgccattagctacagaaaacccattcttatccttattaacacataaaacaatagcttttatctcagactatgctgcctctcagtctcaaacatactaaatctagctctttgggaataacatttaaattacaggttggtttcagctttttatacttttaattccagtggaaactttgggtgcctctcctctaatgagatggtcaagggattagtgttcactccctggaaaacaaaagccaatagtctaagcagccaggtccattctttaggtggacctgggttgggaaagtaggttggagacgagctgacctcaccagtgtgcaaactgtcctgacagttccttgtgagtactccgaggcatagatagctctcattacatgcagtgttgtagaaagccacatcaatcctgaattggatactgaacacagaaattagagtgaagtccacagaatatataaatgcagtctgcaacctgcagagtgattgctacccttgcattcattctgaaagccatccttgagactgcatataaacatattctgataacaacagaaatgctggtaaatggacaaacagttgattagaggagtttcacagctccctgtatgatgctgtcagagcatctgcctttgccaccggcaatcctttgaggaaaggactcctgcacattgcatctcttgatttaataaggtgtctaagctgccattgaaattattaaggctttaaaaattgccatgagtagcttcagtgcccagagatcttctccctgattttgtcacaacaaactagtgtataaaaaaagtgaggcaaaggtggcaaattgacccacatgccatttctcctatgtcatcagaacctgctgctgcgtaagttttcctgaaactgatggtgttattaggcatgacctcgtcagacttagaaaacctgcatctattttagccacttactgaaagcacacagaactgctgaagataaaatttccaagaatatattaaaacaaaactgctaacccagccaaatttcctacacacttggaaagcctgtagaacagcaggccaacattaatacacagaaagacgatagtgtaactaagtagaagctgctgtttaaatgtcaaggttttgaaaattagaggaatggaatgtttacatgagtgccagctatcttttagtggccacatgagttgtttcagcttaccttcaggttatttttaacatgaaaatttgagttgcaatttgctgaatatttcaatttttttttcctaaattaaagaagtaattttgttaataaggtttagatttctgagaaaccatcatgtgctccaattgtagaaaaagatccattccaaatactctcccgaactgagaaatactgtaggtacatagacagcaatcacatgaaactcactattattgatatcaacaagtatcttgggaattgttcaatatcattctgtcttgttctaggcactgaatttatagtaaatcatttctacctactatttactcatcctccaaatatcttcatagctcaaaaagactttactcatttatccccgtatgaaatgagtgacccagctcttccctagcatggctataactgttaggttctaagtttcttgcataaacccactggtttattcacctccacattccctgtgtctaatactgttcttagcaagtagtggtcacagaaaaaatgtttaacagaactagaaattacatttctcatgtgatttatttttatattagtctgaaaaacacaaagtgtaaagcatgttcaattattccacaaataaaatatgatgagtttaacaactgtttttactagtagaacatgtttaaacccctttgacttctatcttgtacttttcttaaatgtgttgtggcagattttgtgtatgtatatgatttgcccaactgtctgaaatgagtaactctatcatatgtgtttttccccctaaaaacccagaccagggctacatattaattctgttgaactaagctgaaatcaaattaaggaatttagagttttcttcatgaaagatgatctttgccatttaaataaacattaacagaatatgtcgatcacttgacttgataatccattttttaaaattacctattagccagccattatttgtgagttaagaattttttatctttatctacataaatagtacttacatgagattaataagctttttaaaaatgtcttcggtattgaggagaaaatacaacagaaaaagataaaaagctctctgtgaattaattacacacaacattaattttaaaaaggaatattggtgaattcaaaattaaaagaatattatcagcaacgtattagatttctttatgtttaagaataaaatgaggatattttaggaagtaagaacttagatttgtgaaatttgacctttcagcaaaaaacaaaaacaaaacaatagaaattgtcctaattataaatagatttgctagtctagatgtcagattgtgtcacattgatgacattttagccagggatattgaaattacaaattatgccataaagaataagcatccatcttggagttcaaatatctgtattataatctagctcctgtcactaactagctgttgagtttgcatagttttaatcactggctcttagtttctttcgatgtgattgagttatcaaatcagatgacctatcagttcctttctagctgtaaaattttccaatcttttagaagacctcaattctacttggtaatgaagaactgattaagtatggtaaaaagttatgtttagcattggagttttcctctattattactattacattagatgatttatcaaaagtggttttggaaaattatgtctgaaagtagacagtggaaaaaaggttatgagaaatccatttggttttgcgttacccgtttatgtatatgagtgtgtgtgttatgtatgtgcattttgtacgttcttctgtttgtttatttttttgacttttttatgctctttagcatttcttacattcagagtctttcaagtgccaaaagaaccacatttatgtgaaaagatttttttggagcatttttgccaaccttcatttgaagctggagtttacaaaatcttcacagagcctattttaatgaggtttccagcattaataagaagagtgtggttgcttaactgaaatgacctgccaaaactttcttaggttcatccatggttacactgaatattaaaactactgaataatagattgaaacaagagcataaacattcatctagaaaacagtgcattttcttcaaccttttacattaagaacaagtcttctcagagcatatgtagcaacaactaataattcttattaagcaacatttaccacaggtataatatgtggtagttaatattgtgtaaaattgaatttgcttcagagttttgattaaaagtattcatttcaggctctgtgaataaaagaatgctagtaaaagtgaagatttcgcaagttgctaaaacaaactagcttttgttcttgaagtctgaaaaaatacgacagcatatttgtttccagatggaagataattaacacaaaaaaatctgctttatccataaatatggttcctttttaaatttcagtaagttcaccaaaatatataaattcccttggaacaagttaaagtaaagctggtattggagaaaaattaaataagttagaactaggtttctttttttcattttattcaaagcatgggaaagatgtgtattacaagttgagaaatcatgtctttgttagtctcgttatttctttgttcaaggtgtttgttagaatgagaatcaggctgtctattgacaaaattatgtgacaatctgcataattatgttgcatatgtgtgaagctagttatgaatgattagatttttgttcaaagttagaatgtctttattttataaaagccagtgactgtgaaatgaataggatttttcatggcagcaaaaatatttccaaatttcagaattagactgccagtatcaaaaggacttagactgagtaacattatttacctctatccattaatgatagaagctaaatgaaagaatttgcataaacacaacagtataagtcaccactaagtatggtgtaacttaaattatttctgttcaagtgcatttaaagtgtcaattaattgcctccatttcaaatgcacaccttttccccaattatcaaattaaaatttgagctgaatcaatgagcacaatgatagtttaattatattaaaccacatgaaataaacagtgaggaagtgtttgtgcagatggccacctgagtctgtcacctccaggcatagccaatgacaagtatcacttccttggtaaataaaattgctttattttactgtcactgcagcatctttacttttaaaagagaggagaatgggttgagagagaaagatttaagggaattatagaaggagaaattgcagacacagatgtattttttttctaagggcaccaggtgttttaaatgccaccagaagggtgctccaggcgattctgtgctgtccaagatagcttggcatagattatctgaaagcttttgtgtcttttcagcttttgattaaaggccagtgtcaggactcctctgggcttttgcttggtacagtaaagccgagggatttttttttaagctgttgccaaaaagatgccagttaggataattacatttcaatttaaattggtaattttatgaaaatttaaaccagaatatgtgtcacccaaatctccttactttcattcctcccaaacatgcacacacacacccctcttgttttgggggagacaatgacagcagcccaccagaaccttcccatgacccagagatatgtgccaggaattaaacagatgagagaaaattgaacagagcctgttttctccgtccaaatgtattttctagcttggatttaacactagtgtacattggaaccatcccagggcatcctagcttctagtatctttttcccgtggactccagcaaaagaagctttggaccataactatagtatttaagacattgttttccattcacagtcaagctttgtatttgttaacaggatgtagaaaaggaatcaaacctacttacagtctctcaccctcttggtgaaaggactagggacacaagtggccagatgaaccctgatttttctgtctgccactttctttttccaggacacatacgcaagcttggcagcaccaacaaagtggaagtaatgttcctttgtttagaatgcagtgtgtacgaacatttacataataaaatacacacacaaataacagatggtgaagagccactcatttcgccacatgttgtaagcacgatatcgttccttgatgatctcatttcttacttctgcctacagatgtctaccagctatttaacctcaggggttattcaaatggtgaaaggtttgaagacaggcacaaatctgtctacagaattttcctcttccatcaggtgcaaatgccctttctgggtggagttgtcaatccacaaaaatgctgtcttctgtctgaagcactaaataataaacttcatttctcatgacacttgttgggcagacagtgtctacgaaagagcacaataaatactgccaatatgctgactttgaaagaggtcttttccctttaaccttttgttctgaacagaaagtgtattaataattttggttattaagtgaatagccttcttttatagatgtgaggaggggccttcggaaatgagtggaagtctcccagatgctgtttgctcacatgtccaatctgtaattagagttaagcctcaaatgtgtggtaatagatacgttgtatagatttaactgccacttgccacttagataacacttagataacacttctcctcccaaaagcacaaattacattccttttaattagctcccaatgtactttgttaaagtacattgagaaagcgaattactaacctattaatttataagcatacattattcaaaagcacataatcattaattaaatatcacaacacataaggaggcagcattatcatacccattttacagaaatgaatgcctgttaaattatttggactatgactgatccagaataagaatctgtgttgatctgtctaggattcattattttgtccaagaggacgtatctttgactcaattctatttcttcttatataaaatgaatcataattttcaagcaaaaatcattaaaaaaaagtgatgaatttaaatcagttagcactttagggaaatctcatgttttagcaagtacatgtatcttacattttacgtaggagagtgtgtaagaaggacttaatatcaacactagaataagacaataaatgtggctattaaaaacaatctaccaaacaagaactatctcaagaaaagaacaatgaacttcactcaaaatggctgaaaacaagcaaacaatcttatctttcagagaatatctagacagtaatattcagaaatagggttagtgactggctggaatgtaaatgaaaagattttaagagatcagaatgatttttggaaaaggaaaataaataaacaaaaaagagagttcatttagctgtatacctgaaggctaattaaggcacactaagtgatcaactgaacataaacatattccagaattatcagatcattcatccacaagcagaagaagaaacagtggccaccataaggaagaaagggctagaggatagacgggcaggaaagagcagatagtaaggtggttggactaggtggcaaaagagcctttggcacaaaaaactgtaggacaaaggaagaaaaatgtaagagaggtcaattaaacgcttgtaaaaacagaaaaggaaaaaaatgttgataatctgacaaaatttaccggcaagcaccagatttgagagcattgcaatctccaagaatatgatgtgcacttataaaattatgaccttacagaaaaaaataataataaaaaacaatatatttctgaggacaggtgcgtattcaagtgacctcacttgcttattttaatcacattttaatcacatcatggtgtttttccagttggtaagtagcagaagacccttgccctaactaaggtttttcctatcctccatactctccttgctctatcaagttccacatgtatagatcacccatgtctctatgttctcatcattcttgctctttactggtacagccaacaattgggataaaacagtcatagtagactgttccatttggcatacacctaagtcaaaccaccaccagccgctatattctgtcactatattctgtcataatagatgacagaaactctgagctgtgacactgatataccaaatactagataaaattatagttctcagcctctggactcatttatggcaccggaaatgagcaaggaaagctggactggtaagtgacgcctatggaaggagcctagcaggagctaggtaaattcccaaccataggctggtcctccagtgacttggggccttaacaagttgaaaataaagcaagtaacaatttttctctctgtggagtttacagggaatcctagcagggcaaaaaattgcccattggtatcttcacaaaaattttactgccagtatacttttccttaacctggaacgtcttttttaccactcttttaacctttttctcccccgtcctgatctcagtctcaaagaaagaaagttccataacaaaaatatttgtgggttgaatatctacctagatgctaaatgctaggctaattgtttacatgtgtgttaatttatttactcctctcaacaatgtcctagaagaggcttccttagagtcaataatgaggaaagtgtattaatctgcaaaaacctgagttcaaggcagggcctggatcaaatctataactctcttcctaatgcagctactcttactaaagtgttaacagtcttcttctgtttgaaaatcctcagtcactctttagtttccttaagattgatatgtttggagcatcattttggaatgcattgaactcccagacacccacccccagcacactccaaactctaacacaacttaacctgtaggtcataatttgccacctcacaaagctccttccttaggctcttttcttccccttatccttcctgctgttctgaattccaaaagtatttcttacattttctggaccatccactttaagtctttttttcataattgcctccacagcttcaagacagagatgggcctttttttaaaaaaaaaaaaaaaaaaaaaaaaaaaaaaaaaaaagctttccctgcccttaaaactgaaaagaaaaacaaaaaccaaaaaacaaaaaacatcggtttatcacagccgttatttttcttcttcctttttttaagacatggggtcttgctatgctgaccaggctagactcaaattcctggtctcaagtgatcctcctgcttcagcctcctgagtagcacagttttatttcttatcaataagatatataatatctgaatggcaaattgaggatgtagaatattcatcgttgttgaattgtattaaatagtttcatattgcatttgtttgtatgaaaaagaaaagttttacttaacaaaagacacaaactaatgactagttattgccagttgacagagtcttagtctacttgttgctgctatagtagaatatcacagactgggtaatttataaataatagatgcttatttggcatatggttctgaaggttgagaagtccaagattgagggactgaatctagtcagggtcgtcttactgtgtcataacatggcagaaggcatcacatgataaacatgtgagacaggaaacaagaaaccaaattcatccttaatagaaactcattatatagaaactcacaataactaaaccactcctgtgataacagtgtcaatctattcatgagggctatacctcttaaaggtctcacctcttaatagtatcaacaatggtaattaaattttaacctgagttttgcaggggatattcaaactatagcagacaggtgctatactatgttctcgataatagttacatacatatatgtgtgcagacaactatacacacacacacacacacagacatatggcttgacaaatcaaggatttcttgaacaaacatacaactaatgaaaatcagaaatgagttgatgctttatactgacacttaatttgtacttgattctcattaaggattaccctttctttgttttcagtctctgcttagattttacttaaaaatattttcctaatttatttcccaacatcttttcctgctggtatttctttttttccatcatttatttataatgaaggctcctccaaatactacttggtctgagtttctggaatccttttggcaatttctttgcaaaagtaatgtttgggattattgtgtagctctgttgcccagttggaactgaacatagcatcaagctatattgactactacattttatttctttttatgcttttttaaaaataaaataaccactacctaaggaaaactatagctatcttcaatgtagggctcaagtcaaaactctgcaactcaggctgaactgaattcaaaaattaatttagcacttacttctttgccttgcaataaatattgatagcgacctccactttgagagagattctcaggcagaaactttaactctagagatactattaggaaatactataagttcttttgcttccaagcttccatcttatgatttgcattttatatttgtccctagagatcattttcctacacttttccagctttttctacactattctgtggccaagagactggcctctatccgtcacaccatgctgactctcttactctgcatttcttgttggttcagctatgggagaaaagagaggttaaaggaaagagaaacaggagtatttactccctcagctccctccttgtttgactgagggttagctgaggttgttttccactcaccaaaagacacttgtttgcagatgttcctgtcttatagttacaagtctcactgacattcaataactgctccctctcctcatccctttggtctcaggagtaataaaagcttcctaaaatattggtagccgttaagatctataccgtaagtcatcacttacccagtattgtttcctaataattgtaaatagtctattaaactcatttctagtaccctaatttgagtgtgctacctccttctttctgagacactagctgatacttgtgcctttttcttaacctgctcaattacttgtctcacagacctaattcagtattaaacatttatgaaactaactagtaatcacaatttttaaaatataaaaataaaacaatcacaattttaaaaaatcattctgtttaagccacaaaacccacaactatcatttccttacttcctcctcttgaaactctaataggcatctttctatgttgtgttcttattttagttagtctaataaacttagctttgctttacgaagaaaaagtgagcatagtcttgaatgcttgaaaatgtaagttgaaattttaaagactatagttttatatttatttaaataattgttacaatttttcccactataacttgtattaagaatgaccccctccacatagctaaaagtatgtgaaagcaatataacatttcatagttgctataaagtggccaaagtactttttaaattaatggcttgaaaactaagagtgacatgacatttgatatctaaaatttatttttttcaaaaatagctcatctgtatacccacctgcttgtttggaaaactaaaactcaaaacattcatcctcaagagagatgggtgactccctccctttatcattaatattatattagtgactatgcaattgcttttgaactttaaaggcagattatccaaagagaatcaagtttccaagaaaatctctgcatgcttcagtcgtaaagcaggtagaatctttaaatattttgtgtggctattttgttgaggacatacctttatgaaagtagtcttaaaaactttcaatccttgaaaactttcttagagattgaatacagataacatcactgatttaatgtttttcaagggattcatctacatttttttcttttcatctgagaataatgaagagccttgaaaatgcttcatgactacgagggcttctttaaaagagttacattaactaaaactgaaatgtagttaccacacaaaggcaaggatagaataggaaaagacaatgaagaaaactccttgtaggcataggctccttatgaggtttgggcttctttctacccactatatcataacagtgtaagaaatgttctttgatacacttctcattcttttctcattctcttccctgtactgatttttctccacgtgtcccttccagattcattatctgccctgcaccaccctatgctttgctctagaggctaacagcacaaattacaaaccctgggcatcgttgccctctgattccaggataggccataaggtgggagtggactgggtaccagcagagagcacccagggtatttctgcccccactccctctgtggttcagttctacgtctggggatttgctgtgtccctctgtaactgtaaacttgccaggcagcatttctccaggtctttggctctgactgcccttcaataacagtttcctttgcttgcctgtttaggactaaaggcagtgatggcctcccactgttgttagtccctgagtacctcttggttcccttaacactgccctgtaaaaggcctccagagtttgatccgagtgagccctatttcaattcagaattctgactgatatatccccttttatgccttctcctgactccttccaggtaccaatatgttcatagtccatgaccactatccacaggatgctgtaatggacttaatgtgtttctcctgcatagatgtattttcagatacagttgtatatatggtgggtgctcaactattctggtagaagtaagaaggtgatcattgtttaccaaactggacctcctagagttctaagattttccctctgtggtatcacctattcatttgcccatcagtttccctagctcttattcccttgattcaaactgctgtggttaaggattcaaaaggatgaatgacttttatatagccagaaaaatatctaacagctgccaaaatgaacaggtcagcactgtaacagaaccacgaaagttctagtctctgaagagtaggtgtccagaggaaaatttcaaagtagataattggtctcctacctttttctgtttttccccttgccttctctattttctagtgacccgtatgtgacatttaagaaggtaaacacttgcttgtgaaaaaataaatgccttggtgagaaagtatggcaaagtcacgtcttgggaggaggaggagttagagcgcagtggacatagacattgcattctgagttcatccgaaccatttgttttttgtctccattatgcctcatccttttgtaaaaatgtgtctggtgacaaaatggaaacatagagacatacaaatccttctggtcttctttttctttcttgcactaaacacagtgagatcaagagaccccacagggcttaaagttatagctgccagtccactatgaacttgtcacgtacgccattagacctgtgctggagagtaaattctacttctctgtagtgggaccagactcctagacaggtaacaaagacaagactcaaactgaagacactttgtattcagtagactgatgagccaaaactctgttcagccgacagcacattacaagaaaaaagggaaagacagatttctaatatgacttttctagaaaatatgattttatatttttatttatatatttcatataagtatacataatatataaatatttagatatattttatatattatataatatataaatatttagatatatttttatatactatataatgtatacttatatattatcaacatacagtatcttcctctttcttgttctttgcctgtataatgtgtcaaaggcctcaaattcttttctttaatactaccccattcattgatacttgcattatcaattacaatttgtcttgtttaaagcatctacattactgatttatcaactttgaaaattgtatagctttaattccacagatttgcataaagttagttatgaccgccaaaagtataagaagttcgtacactgagaacagaatacatcaatatatattattagaggaggtaaaatgcaatgtttaagagtccaagttctgcaatcatgcttcctgcatttgtagtcaaatgctctaccactgggctataccctgcttgctgcttgtatttgaatcctggctccactacttctaggtctgtggccttaagcaaattacttttctgtgtattaattctacctgtacaatgaagataatgagaatatctgccttagtatgttaagtattaaatttgttagaacagtgcctgaaaatagtaccgaaggaaataaatttatctaaaaggccttaggccaaccttcaaaccaatattatgattgactcccacacaataagtaatgaaggcttaacctaacattgcctgatgtcatccccactttcacctgtagggtgaatgttagaataaaagtctttagtacgtttgctccatttgcaaagagctgccaatgtaaccctacatcagggagggtaagaagacagaagctgggagcttgtggccataaagaatatcctggcccctttcctgattttctatacttattattgagactgtcttatataatatttataaatatttatgatttataaaatatgttgtatattaacataccatatgtgatgtacttcaaaatatatttactatttataaaatatctatgccctaaagggacttgtccattaaatgatcaggttttaatcttttctactttagcatgctcattcttttgagaattgaggaatggctggcccgaggtaagaactcaatatacaagctgacatgatgcttctcatttttctctctcttctaatgcaggtccaagttatgaaagaaataattgaggccattgtgcattactcttattctaacactgcctgatcttgggaagggatcaattgcaaagtttatatgaattgagcttggaatagtggagtaagcttgaagaacctatcttgggaaggattccatttcataggccttgtttattagctcaggagatatgagacatggcaaacctatgagtgattggaaaatacagagtagcatatccaattttggagaagtagttttcccaagggttaatgtcttaaaaattaagaagctaaagattatttcaaaagattataggtgagcaatacaaagaacaatccatagaatagtctggatatattaggtcagagagtaatttaattgtattgtgtatttctggaacagactatagagagaagatttaatattatatttgtagactgtcctgaagcacagaagaaaaaataaagagaaggatccgtgttggatggaattgggattcatagatgacactcaaattcagattggactataaactggaggggtgtgtgagtgtcttgattttttacgttagcatatattgcctatatgataatttatttaaaatgtataatgaaagataagatcattatctaatcgattgagaattatagcagaagaaaaatatataaggaaaatttatgaatcttggagtagactcgattttactgagtacttagtaaacattcaaatttccagagtaatgataagggctcaggttcattgacccttgcaaagacaataccgggatactacacagtttaagttgagaacaattgatctattaaaacaataccctggttaaatcactatagagtattctggagcaactagctggaaaatgcctgaaatagatctgattaagactcatatacactgggatttaatgttaagccaagatagtatgtgaggaagatgcagtcatttttctaaaatgtgaggaagtatattgaatcttgaaaattgtaaaaggtgctgtgtggaggactgctacacgtccctctgacccatgtaaaataacaaagcaaacatctgatcaaaatacgacttttgaagctctcttatgcaaagagacagcctaacttctctggtctgcatgttctctttctctttgtagatgatagctacataagttgctagtgtctctggacatcactttttgaaattccaagttcaaattcccttattgtgctctcgtgttgtattgctaaccagcctaagcataagaataaaggtgggttaggtgttcttccaattgttacccatatctgaattctgttattgctccagtcttaaacaacgtgagggtctaggcatagaaattttgtcaaaagtagcatggcagcctgaggcagatgaagaataaagccatagtagaaacaatataaattttgaaaaacagctacaaattaggcaataaaaatatttagctggttcctctggaggccaaaataaagaagaaacaaaggaaggaagggaaggagggaagtagggagggaggaaggaagggaaggtaagaaaaggaaaaggaagggaagggaagaggtttcagctattattattgggatgtaaaaattctacacttggattgccaggtaagataatgattttcttggaattcaaaaacagtcagaaaaaccttgactctaaggatatgtctggccactattagatatgtaccctctttgattgacattttcttttgggggatgataaacctcatagagattttctgtgatttaagtaagtaacatttgaataagaagtctttcatgtagcagacattcagtgaactccagttctcttgcctataaccaattataagatactggttggatgtgtatttttttttcacattcacttctttaggccattagataatgaaggaaaatttataatgtctagctgggaaatcacataaattttaaatcacagaaaatggattcaggcagcgtgataaagatcttatatttaaaaatgaatagactactaatgcacatgtattaaattatgccattaaaacctaaaattctctcttattttctaacaataacatttgtatctggcattataaatcttcatcatatatacccagaaactggggagtgttcacgtaagtgggagttgaaatttattttctatgtaatgtaaaaatgtacattttaaaggatgggagggaaaaggtaggatttttctgaaagatacatgccagtataagaaaaaattatgatcagggtaattcctagaacatacagaaagaagagattgctgcagaattcatttttcaggaatcttttgctaatgcttgacagtaactcagaagatgaaaatggagaacagaagaatacatgatttcaccaactgatagaaaaggaattaagaagcttttatatacatccaaataggccataatccttaattcctgtgccagaaaaaataccaagatgaaaaagtaaacatttccacctcttccttggctacacaagtattgcttatgttattctcttctgtaatatttttcaagtatctctaatgtttacatatgtaaaaataagttttaaaatactgagctcccagacccagtcagttattcttggcactaaggtataactaacgaaaaagagaaaataagatactcactttgtagccaattactcatacatgcccagaaacagaggagctagtccacacctgtctacatgcatatcatgtcctggagaattatcttattagatgtaatcatatgaagatatatggccaaattaaaagtatatgtacttccttaattatttcaaattaccccatattttatttgttataaaatataatttgagtctactatttttagatagctgaatgaaataacttttctataatgaaaataatacagttaaaagtttgcatgtagaaaacaaggaagtttagtatttttgttttgtttttagtttattttttaaattatattttaaaaacataaaatttaacatcttaacttttttttttttttttttttttttttttttctgagacagggtctcattctgtcgccaggttggacaaatgtgttgagcatatttacatttttgttacacagattttcagagctttttatcttgcacatttgaaagtccatacccacaattacataaaatatcttaaagttatagcattctactttaaaccaaaaacatcctacctttaatcacgtaaaataactctactcctttatggtctaaccctccacactttatgttattgatgtcacaagttatgtctttatatgctgtatacacattaacatagaggtaaattttttttaatgttttttacattcaaatccatataccaaatttacaatagtacaggttagttaatatatttgtccatgtatttacctttaccaggcaaccttatattttcatatgtttcatgttgctatctactatccttttatttttcacttgaaggactgactccctttggcatttcttgtagaacagatctaataataataaactttctcaacttttgtttaaaatcttaatttcttctttactgtggaagaacatttttctagatacatagtcttggttgacttttttttcttcatcagcattttaaatatatctttatcttctttctggcttgcaaagtttctgctgaaaaatctgccattaatcttatggaagatcccttgtatgtgattaatcattttctcttgctgcttctaagattctctttgttgttgactttaggtagtttgatttatgtgtcttgttgtggttctctttgaatttatctttgaacttcttaaatctgtatgttcatttctttcctgatatttgtagagttttcatgttgttccttcaaataagccctctgcctttttctctttctcttttccttctgggattttcataatgcatatgttgatctgcttgatggtgtccataaccatgagtcccttgagttctcttcatttttcttcactgttctttctttttgcttctctgactcaatgatttcaaatgacctgtcttgaaaggcacttattttttttctgctgttgaaaactctgattaattttttcatttagttactgtatttttagctccagaattttggattctttttgtagtttctatttctttgttgatattcacattttgctcatgctttgttttcctgaaacaagatattttcattttgttttcatttcaattaaataaaattagcgtctatgttctttttaatttaagcatcttcatgagagttattttaaactctttgtcaggaagctcatagatacctgttttcttagggtccatttctggagttttattttgttcctttgatttggctatgtttgtttccttgaaagatttataattttttgatgagatttgagcatctgtaaaaatgatcaactcacccagtctttgcatcctggcttcctgcagtggaagacctactccaatcagcccaactagaggagctaggacctcttaaactttttccaatctattgctcttcctggcatctgtctgcagaactgcaactgtaatatgctgcacatctctgtcttcagcagcttccaaactctgacactggtcctgtcagtgctccaagtcatataagatagaaatcagtctctttaccatcctccagaaaagccagaacattgagtgcaaggtctagtcatttgtttctaacctgagggtccagcgctagtatgggaggtctcctcagggttgcttcctactgtgccacataagagaaagggcacaggcacaaattgtgcaccaaatgtggtagatctttcttgtccttttgctgggacccgttcttggttttataatggtctgggtattgcagattttcaactgctctctagacttctcactaaagtattctggtccatatattatgactaacatagtgtctctgtgagggaaggagtgtctgctactttctagtcatcattttactgattatcacctcaagcttttttttttttataccaaatacttggtcaataggttaactcaatagaaaatatattttaaaatgttttatattcttgtaacatgatatcacaagtatcaagtttgggagaggctatagtcaaaaacagatctccagtaaacatatgatgattgaacactagttaatgttgatattagccacctgagctctttgcaatattcttacagtgagtaaaatgatctcttcagtaaagttatgtaaatgtcttttcagtaaggaaatagaaaagttagaatatttttttaaatccttcaggaaagtaccaataagaaacaactgagaggcaaaaagtgacagagtatgggaacagaaacttgataaagaaaacatgttataatagaattttctaaattgtataaggaagcatggaataatagagagccttatcagtgagtaatattcaataaatcattaagccattctgagacttacctcatctgtagaggaaaatatagatatctattggttgactatatgacagttctatgaggttcaaaggaaaaatgtgtgaaaatatttgataaattatcatactcattttaatcacatgatctctgcactttcactctcttcgtctgttaaatacaaagtaggcattgaaattctctggtcttctccctgtcttatcttcctcaaactcgatttgacaaaaccttaaatctgtaaagaagccagtgctccctactcacctattctgtggaagaatttttctgctacttacatgaagcatttagtttcagatgttctaaaggtcttcagggagcttgtagagctcaacatttttgcaatgctaagtctgggactattcacaaatgtcaatttgagtttcggaggcattttagacagattagctataagcacagtttgacattatttgatacaatggaatcaattacaattagctcttacaagactgactctactcagtgctacatgctaccactgaggaacattgaggagcacaaaatatttatatcaggtgacataacatggaataagcataagtaaaggaagtggagtaaaaagctaatcattgctgaaactattctttatgacggtccctaagagaagttcttaagctaggtatttttgcaactactttataatgtaggcattctaatatccatatcactgtacatgaaaccaatactagaaaagataaaataattcatacaaagtttgtaaaagtagttaatagaaaaccaaagacttgaacccgtgtatgtgtatcttaattatatttatctatattttaaaatgtagatatgaatagttaaattttataaattgaatatttcccattaaaaataattagaaagttagagataaaacagatttcagacatgataaaatttattcaaaaaaatagtatctttgaaaatcacatttaaaagagttctaataaccatttaacaacattcagttgaatcgaatgttaagaagaaaatacttactattaaatatgagaaactgtggtgtttatcggtaagatccacgaaggaagaagttttaaagaaaaatactttaaccgtggaaaaaaaaaactttaatgtctattatcgaataggggccgtaattacttttgcaaaataaaaaaacaaacaagactagctatagtgtaaatgtaatctgtatgctttttaatgaaacaattaagtaggttgcccatttacaattagcctgattttctcctgtgtggtattatgtgtacttaacaacaggacccagtggaaattcactcatttaacaaagtctgcctacatggtttcaaatatgggcctaacttgaaaattcagtcataattaaatctaaggactaaaacaaatctgtataaaaagattctgctaaataagggaaaattcaagtctagggctacattctgaaagatattgaagtagaacctctgcagcaagactaggcttggaaagtgcggggaggagggaaaagaaacagattaaacttgatatgcagtaaacataaaggagcaattttgttcaaaacacataaatttagcaagatcaccagactgcaaataattgtaatggttacaaacaaaaatatgtttttcatagttttagtgcagaaaaattaaatccgtctttttagcttggatcatgaaatcctagcaacttcataaatggtagaatgattttaaaggaaagctgtgtagctatgtatcacacacagaactaaatatggataagcatcccttttgtgtagtttttgttcatcctgtgtaattgtttattgtttctctatccctctcacatccctggcttttgttgtcctttttattcttaatgaaattttaagtacaagttcacaatagagggctattttgaaaataattgttctgttagcaaatgatctcttgtaaaaatatttatttttggccgagtgcggtggctcacgcccgtaatcccagcactttgggaggctgaggcgggtggatcatgaggttgggagatcgagaccatcctgattaacacggtgaaaccccgtctctactgaaaatacaaaaaattagccgggcgtcgtggcgggcacctgtaaccccagctacttgggaggctgaggcaggagaatggcgtgaacccgagaggcggagcttgcagtgagccgagatcgcaccactgcactccagcctgggggacagagcacaagactcccactcaaaaaaaaaaaaaaaaaaaaattattttttaaccttatggttgtgtaaaaaatgactttttttcaaacaacaaatcctgataccactagagcataaaaagcaaacttttcaaatatagaagtattctcattatttgtttttcaatataaagaggataagaaaatgtataaagtgatctactcccatatggcctataatgaaaacttagaataaataaaaattaaattgggtaataaagggcagaaatgcaccataagtcaagaaaaggaaaaaatgtaaataggctttgtgaaataaaccatatacaaatatcactgaaaattaatgatccttagaaagacttaagggctaggtgctgtggctcatgcctgtaatcccagcactttgggaggctgaggcaggctgaatgtttgagcctaggagtttgagaccagcctggacaatatggcgaaccccgtctctactaaaaatacaaaaaactagctgggagtggtggcacacacctgtaatcctagctacttgggaagttgaggtgagaggatagcctgaacccgggaagttgaggttgcagtgaaccgggatcatgccactgcactcccatctaggtgacaagagtgagaccttggtcttgtaccatatttttgcaattgcaaattgtgctgctataaacatgtacgtccaagtatcttttttgtttaatgacgtattttcctttgggaagatacctagtagtgggattgctggagcaaatggtggatctacttttagttctttaaggaatctccattctgttttccatagtggttgtattatactagtttacattcccaccaacagtgtaaaagtgttcccttttcaccatatccatgctaacatctactttttttttttaatttttcagttatggccattcttgtaggagtacggtgtcgcattgtggttttgatttgcattttcttgatcattagtgatgttgagcactttttcatatgtttgttggccatttttatatcttcttttgagaattatctattcatgttcttagcccactttttgatgggactgttttttcttgctaatttgtttgagttctttgtagattctggatatattagtccttggtcagatgtatagattgtgaagattttctcccactctgtgggttgtctgttaaatctgcggattatttcttttgctgtgaagaaactttttagtttaattaagtcccacctatttatctttgtttttgttgcgtttgcttttgggttcttggtcatgaagtccttgcctaagccaatgtctggaagggttttttccaatgttatcttctagaatttttaaaaagatgactagactgatgtctcatacaactaattttattttgatattttctcatcagccaagttcaaagttccatagctttttacattttctacccattaatgaagttgccatttagtttcctggattacctgctttccttttcttttttttttttttttttaatgtccacccttcttcaaaacgtggttcaaaagttaacacctcacagaaaaattttcttcttattgtcttctgacatttatcactcttttactgcatctcagtctgcaacttactctgttcgtggatgttggtcaataagtttctataagtgtgtgtgtgtctgtataagtatacatatgaatatgcatgtgagtgtttttacgagcttttcaggggactatttctaccgttttacccctacctcctagaatagggctctaacacaaaggaaaagctaaataaatgttactaaaccactgactgcagtaacaatgattttagttattaggataaaaacataattagcacttgtagatcacattagggcttaacaaaagctttcagatatatcagctaatatgttcattattttataatatatagtttagtttatctgctgacaattaaagtgtataataacaatgatttgtatttagctttgaagtgtggggatttcttttgtatttatgtatgaagatatcctgggaattaataacattgcaaactaataatggattctttaactaaccagctgagcaatcccattatgcttctctgcttcagacagttctactatgtacaccatctacctccattctgttttcttatttgagtcagatttctttccatccttgagtaacaataaagatttcagttttaaaaaacttgaacgaaagctatgctgtaaatatccacactcccttctcttctactcctcctaggctttaggcagtaggcagaagcatcaatggagaagataagaaaatcaacacatttacccaagtctcaatggtggctattgaaaggcaatactaatgtaggcttacctgataacaaaagctggcatttgatgaagaaaagattaacagattggggtgcagttggagaaaatactttctaaactcagcctaaaggcatttcatgattactaatacatgtcatagtatccagatcttaaagtagtgtaacaataccatttttaatggtcctttgttaaatgggatagaaaattgttttttaacaaatctctttgtttaaccctaattaagaataacaataaatgtttaaacctttctcaaaaagtattgcttagagagaaaaaaggagcagtgtttatgtgtagtttaacaaatcaccttaataaatgttatgttgatgtacacagacccagaggccaatcagtaatgttagtttaaagttgaattctttatcataagaaagtgaaagaaatgttgagtcatgtctcatctcttaaccccactcactctcagagagtagagacagtggttttgaaagaggaagacagaacagtgaatttgggttctcagacgaagaaaagctaacatattttaaagaatgataatatttcacattcacatttttcttgaagttttattttattcttgaatagttaatacattcaaatgttttaaaattcagaataatcttactattttattttccagtttttacacaaatgatagaatactatctatatttacactgaactatattattatttaatagcaaatctgggagttcttcatatatcagtatataaaaatttaccttattcttttatatgactgaatatgtatactctattgtctgtgaaggggctttacattattttcagttttctgacccttgcaaaacagttactcactgaatagctggatatacttattatcttgcctattaacacacttaggcataacataaagtcttagaagtggaattgttgggtcaaaagctatgcacctttttaattttggtagatattgacaaattcctcttttaaagaattatgccaatttaaaccttcacaaataatatgtgaactgcttggagttttgttgttgttgttattacatcttcgccgacacaatgaataattaagacgagatctttgacaaacttctagatgcaagcagtaaaatagtataatttgtatttattaaatgacaaatggtattgagaatgttttcatatttaccaagtttcaaagtttgtagagttgatttcctgcttgctcagacctgtaaaatggaaaagttcttccttaacaccttattgcctttctggactttaactacttgctaacctccatcctactttcatataacttcactcttaccacaaccctcttccaccacaccaatcacttctgtcctgatgaattccagagagagggaaaaccgttgacacagaagtttctagacacaaagtgcctactgagtagggtgaggaggggaacttataaagactaaaatatggaactctgtgcagctactctggacatattgatgttggtatacacatataatatagccttctgaaatataatctgtgttttattgtgttaaaggtttggcattcctatattcagagatgtcttttcctggtttgttgactttaagtattttttggttgttgctgtttttaccatgtagaatttcctcatgtttctgatgtggaaagtataagaatatcagccagagaatcttctgttatataataatcactctgatgatttgtagcagagtttactaaagaacaaatgttcacagtatcaggttatgagtaataaaaggcctaggtttagaatgggcctgctttcattgtattgccgtaaattatactgtttatgtgtaatatatctggtcaaggttatatttatttctgagcaatctctaatagatattccaaattactgaagagttggctcattctccattaataagatgttattgagcaacctgtctttagagaaacttatttatttgcttgatgtatggatgatgcaaccagttcaagtggcagaaagagtatattaatacaaaatcattacaacatatcacctactgatttgttaagaggtccaagttttcttaaactaaaaggaagtaattccttgtggtttatcttgcttttagagtctgttgttgtctgagtttaagtcatctatcaccatgtccgttttaaaagcagaggcttttaaaaggtctgatgataaatgtctaatattgatatttagaatataaagctaagaatataatatcctttgcctagctcattttttaataattgcacaatgcatgcatccaagtaaaacctaattatagcttctaccctcattttccaaggtttttctagcatgaaatataacctgactatttatccaagctaagtgatcaaacacattattagaccagagtcctcttcaggtgcagggcgccttgttttcacaccggtctcaaatgtctaatgctgtgttaacaaagactgaacatttgaagattgaaataattatggtgtctcagattgagaaatacgaaatataaacaaactctctgactatgcattatactgataatacaacaactctacagagattttcactaaatactcattacattttacatattattattcattccagaatatttctaccttgtaataaaaagcatttaaataatattctgtgtgaacaagactgatttatcagtaatttcctagttacagtggtaaaattttaaaagggggctttaaaaaaaaccaggggtgctttagatggtgatcctttaaataaagactataattcacagacaatgacaaagacacaagttagctttaaatcctccatgctttttaagaccaagtagtgaagaaatttattacagctcaagaaaagagttaagggcaacaataatatcttgctactccaggtaagaaaatacaaattttaatgacagagaagactggtgaccattgtcaccaaatgtgtactttccagaaagcacaattatttcatgtatagatcttggagacacagaacttcattataacctaagaggatccctcctaagaacaggtatataagaacaggtatatagaaataagtacctaaattacacccaatattgaactacgatttttgtctttatttatgtataaaataagtaaaatgatactttttagtaccaacactaatatggataatttgatttaacttatgagaaaatacctcactggctgttcaactttaaaattcagaagaaaaacaaaactcactggccagataagacacttaataatatttggggactaattatggcatagaaattgtcagtggagttaagagtgaaaaatagaaaacttatatgcagtttaaacattattccttgagttgacttatcctttagcttgtcttttgttatagtttgctgcaaatttcggatctatatcttaaattcctagttttttaaataatgaaataagcttatcaagatctcttaaaattcacactagtatatagtgtgtaaatttgaatttagttgtcttttttaacccaaggatgaccatgttatgtgcagagggtcatgtgattgtcccaaactaactatcaagttattctggagtgtcccataaatattttttaataaatacatttttcatgctttcatgcttaattgtacgcactaaataactcatagtagttttcctaaactgacctggaaacatatagcatcttgatccatgctttccttattaaacatttatttatactagggacatgtcaaggacacaaaattcctttctcacagaaacaaaaaccacatccaggtggccaaagtctcttccaggtgaatagggttagcagaaacacagatgaaccataagaacaaaatagtgtcaataatttgtcaaaagaaatcctctataaaataattaaaagaggcctgggaaatcagcagaacctacctgatgtgtctttcccttgttcctgatgtttggccagctttttggctgttggaagtaccaggtctcttgtttccaaagagctgcctgtgttggcctgtctttcagactatcatgttacaaaatctgaagttctgttgcaataaacaccagatttcaaaggaaaagcaatggaaattgtgcagattaaacttcatttttatagcaacagtcagtagtacataactatgtgtctaaacaatgcttcctcttccaatataatattagattgagaaagacactgattttgagggtgcattcagaaaaatatatatatgtttaggtttggggggaaaagggttgtctttcttagaaacacaataaatttatcctttgaatccctcctgaatcaaccatatgcaaacagataactttagaactgtgttattctagagtaagcctcagccaagtgtagttgaaaagtggttgggcataatgagggcaaccctgacacaaacatagacaatatgcttcccgagaaaaagaattttaaaaaagaaaaaacaaaaaaaaaaacaaagtcaaatgagagcacaatatttcaggagtaactcttttctcttgatgctcatttaatttgaaattagttacagggacctcaaataacagtacctcaagaattactttttttgatctttcaaggacattgccattagcactatagtgtctgtaaccttcaaggttcaggggataatgtttaaagaagactatgaagttaaaatatcaaaaagtcaagaatatgctcataagctactgagaaaacccataagaacatggccagggtaccaaggaaactgtatcttctttttggggggtagaaggtatcctttacattttaactcactattttttgtcttagcctcttttcattccttcttggctttatagggccagtgctctcacgatgtaattgctatagaagtgaaatctctcagatacctatcataacagaatggtagagttataatttcagtgcacatattttacagatgagaaagctgaagctcgataaagttgtgatttgtcccaaagtgatagctagctgtgtcaaaatggagggaaaagtccagttctcctcattatcaggaaagagcatcttttctagtgtactgtgattaaactttcctgggtaaatatctcttaaatagtctaacattagatacattggaatggaagacatggcaaaattaaaactaaggttataacaaatgatacagataaattggagacttggctgagtcaatgccgaatagtatatatggtggttgatggggtgttgacattctttctaacagcaaatgtttatctggtgttgctggctgaaactgcatttagcatggctgaatttacttggaatatgattcctgtagaaatgatcttaagccttcgcacaacagttgcgctagagaaaattcattcacaaacactggtcaatatagatatcatgtgggtaagatgtattttccttcagaattcactctctcgatttttctttttgcactactggccatgactaatttttcataacctttgggactgatgatgttactttgatattttgtctatttttctactcctcatgagactagcaaaactatttgatatatttattcctgctagaatgtcatcccagggatcccctattgaacttctgtgccttcccctttccccagtataaggccaaccacatggaagtgggttgtgttggagagttggggtgtttgagtgtgcatggagatcaaccacaaggatacctgcaggataatgcaaaagtagaccaaaacatcagccaactgttacaataggatggcaatcactatggctagtttaaaaaaatagaaaaaaaatggttttggttcttttcctctagaccaaaaataaaatgttaggataattggacagttaaaagctataaaatgttaagactcattcagggaaaagaaaatgcaaattttagtagtttgcagtggatcataacctgctgagtcaaaactgggacaaaaagtaaatcaagccaggcatagtggctcaggcctgtaatcccagcactttgggaggccaaggtgggtgaatcacctgaggtcaggagttcgagaccagcctggttaaaatggtgaaatcccgtctctactaaaaacacaaaaaaactgggcatggtgatgtgcacctgtaattccagctacttgggaggctgaggcatgagaatcacttgaacccaggaggaggaggttgcagtgagccaagatcatgtcattgcactccagcctgggtgacagggtaagactccatcttaaaaaaaaaggaagaaagaaaagaaaagcagatcatagacatataagcctttaatcttgtgtttaccattagagtgaataaagaaaccatggtttatttttgcataatttataaataccaattttgtgacatttattaatttagttattaatttaaaataagaacatatttgtatattgccaaactgttaataaaatgagtccctgttataaaaagatcacaaaacatgagttgatattccagttaagagaaaattcaattaaatgatcaaaatatttctctggcaaaggtagtgtccaccctgaggtgagtccctcttaatggaaccatggtaaatgacttccttttcaactcaaacgtagtccctcttacctatcaaatggataatgtcatattttatagtcatgaatttgtgtttgcattgtcatttagaaaggattatcaaatcatacatagctccaaattaaaattggccacaacccagggacactgcaagacagaggcaaacacgttagctcaccacaatgtaatataactcctatagttctgaaatattcaagggattgtgtacttccccaataaatagaataataaatcagtaagtagaataacactttgagatcagtgccaaaataatatgtattagtttaacttaagaaaagttcaaattcagaaagacaaatttgtatgtcctcacttctatgtggaagctaaaaatacggaactcgcagaagcagaaagtagaatgatggttaccagaggctgagggtggggaaagggaagacgatgatcaaagaatataatgtttcaactagatgggaggaatcaatgatagtgtttgaggtgatggatattaattagcttgagccaatcattccacattgtatacatatatcacagcatcattttttaccttatgtttttaccttacagttataacttgccaatatccaattaaaaagtttaaaaaatatatatcaagaggcaaatttttcttttgaattattttgtacaaaggaaaatcctttaaaaaaatagtttcttgccattttttctgttagtctcattaacaaaaaaactttcatgaatgacagtagctgaaagggcatgttccaatgggtcaccaagactgcttatgggagaatgtgcagccaggagtccacagagaggcaacgtaatctgcgggtcatgaaggaaatatgagtaagtcagatatggccttgaccctggctttcatatgcaatcgctgcatgtctattttcatctctgagccttgactttcctattactaaagtggatattataatggtatctgctgtattaatcctgttgaaagaattacatggtgtaatacatgcaaacaattagcaaagggtccaggttttcgtaaattctaaataaatcttagattttattttgtttttaatatttttactattacaaaagtggcccaggtcagagcttcattataacttggaaattttttttatcactgagctgacatgtttgagtctttcattaaggaagaatcgttttcacaggtaggtgactacacagaaaatttgatgacaactgaagtcacaaaaagagaagaattttttaaatgttctcatgatattgaagcaaaaggagcaccagacagggagatggggtatagcagcgctagtcctgaatctcttactaaattgctgagtgatgtacaagtcatttgggggccttagtttccttaatcaataaacagatttttattgtcacttccagttcaaacatcatatggctgggttgtataggactgtgaagttagaaaactcttccttttgtttggtacatggagaacttggccaatttctctgtcatctgtcatagagagggtgccctggaagcacttcttatcatggaaattcttgtgcaagggatttttctttttatgggaatgctcctaggaaaaatgtgtaagagagtaaggaaagaaggagaaggaaagagaaagaagctaagtagcgatatggtttaggtgaagtctagctccagactgaccttgtgtggaactctggaacataaactataccacatctaccccactttttagataagaaaggactttatccccacagaagtcacctggatgcccaaggttgggagcaaggcggctccagttacccaagatctaagcagtggaacctttatcaaccagtaaaagaaattgctaagtattcagaagaggcaccaccagccacttctattgcattgcttgatgtactgcatactgaaagcacttgaacttacacaacagcttccataaatcagcctcatcattataggatatcattgtgcaacacttcctgtcttactggacagatgctataaactttttaaattgtttgcttgatctttcctaacttatgattacaaagttcaccatctcctctattttctgagggtcacaaggcccttcagctgattgcaaggcaatttagggagatgatctctggatgtacttgtgtgttagaaaaatctagacattaaaaccaaagtagggtgtggaaacccttaggaactgaccatcagtcacgtccctcttttcttgctgaaaagcaattcttatattttaattctaagacattatcttccttttcaacagcaagtgtcagcttcatcagaagtatacattatgctaagaaagtaccttttgaaagaaaaatatgaaacccagacatcaacttcaagtttttcttttaaaataggtaaagaggtagatgctcatctttgaaactaacaagtaaaaaatcatttttgattccaagatcgccactcattttactgtaacacacgatctagtaagaattgcatggtatctcagtggctattaacttccagcttctctggcctagcataaatcctgagagagtgtgacacacttttctcttaggcttctagaatagaatatccctggtgttcattttctttgagataaattatgttactttggactctcttacattatttcagtcaaaatgtcttccttcaagtactgatttatttccatcattgtggcaagaaataatagatgacaaaagttaagaagcttttacctgtaaaacaaattactggaagtttttctaacaagaaggggaaattagatccaaagttacatcatcttttagacctaatatgccctattaataaaatttacataaaatttttaaagaatttaaattatatctaaatgtatataatttagtcctgatttggtttgaggggtagagtttttatttatttatttaacttgtggcaattattttctcttcttctttctgttttctttctttctcttcttcttcctttcttaggagacacaaatttacataaagaatatcactactattcagtttttaaatgtattaactgtaaaagctttgaaatattaagcaatgaatttcatttcatagtttatgaacaaatgtgagtttcacagttactttgatgtgtagggtttgttttctggctaagaaatttatggtaagttgaatgctcactgtgcagagttaattctttttaactacattaaattttcattataactgctcatataaaactaatgccactttgctatagcagaaagtgctaatatcacagtatggcccacaaaactgtttctctgttaatatcttaccttattttcaggcacctataaaatagtcatggacatttattcaatattgaaatataacaaatatcaatccaaaaacaagttttatttttcttaaccttcagtcttgaaatcagaaagggaaaaaaagagatgtcttctcccccagcagagcatactccagaaacaaatatgctacatctgttttagctggcatggatcgggccctgcagggtaatacactacttcagatttcaaaactgacagtcttcaggctagtggttctccatgctgcaaataaagattttattttccaatgatatttatttaggattttttttgctgggtgaatcgagcttgtgagtttatgaattctactaaagcaattatctccccaactcagaaggagctgctggaatctctcatgtgagtaccacacagccagcaggttccctcatcacagatcatcacaataggcattttggtggtttatttggaaggcagttttatgctaaatcccatttttcaatactttgctacttcttcaaaagcttttctttagccttaatgtggagttaagagcaatttacccattttttgagagattgatgcatgagtaaagtatttctcagggtatttgaagactggatagtatcaaatcaggtcatgataaaatatagttgaaggcagcattttaaattgaagaaccacatgaaagcactgagttcagatattttgattctgaagaatacacagggaatatttcgcattcacaaaggattttcttcctaacccctctttccctatatccaccattccccaaacacaaacatgcacacattcttttgaagtatgtgaaggtgaaatcatagcaggcatacccctcagtctatgcctgtgggcatgattttaaacagaaaccttgagggggtttatttctgttaaaatgcatagacaggaccatggttttttcaaatttgcacacaaaaattcaatacaaggggagtcaatacatgtttatatgtatgtactaacatatacaggaacttattaatatataatatatttatgctactggcagagacaggcaattaaacaatgtgcaattgagcatgtaaaactgaggtccggtcaccagatggaagtgtatttgggaataagcctgccaacttgtgctatatgcaatatgcttatactcagaaaatacatcatccatgaaaggaataaaatgaaagtttgctttcttcattcagtttcaaaaggagtagtattttggtggattttctttttttgtatttctttcattacaggagaaaaagaataatgacctaattgccagaaaacgtgcatacaacatgagacttggggatctgagctcttgaaagccataccagagattttctctaatacctttattttcaaagtgtctttccccaaggggacaacatatctctgcagacttcatctcattgatcctcacatgatcattgttaaggagtcaggaaggctaagacttctgtagattccaccagtgaaacagacagacaatagccattagaatgacttgattgaaattatagagtaagttgggagcacagctggtgcaagaatctgggtctgctgtttgccagagctttcttctatctgacagaacatattgcctaaagctgagaatcccacagtgtccttgattacgtattctcaaattatagctcactttagagattcctattaaaaatggagtatggcagcaggcctggaaatcatttaggaaaccccaggtttcaagcgggtgggagatttaagaagcagggctggaaggatgaaatatctaaaacatgggtggggatggatgtctaaatggctgtctactggatctttctgtggagagggcatcatgctaggtgttctgctggttaatcagaaagatgcagaaggtattccctaggagtttatttacttacttgacaagggtcttcttgtgaaagcctcatttcttgcgaaagccttcttgtaagttgctggagaaggcagatgaagaataggaagatgtatagctgttttagaagcccaagggcagcttgaaatgaactccctcataaagtagaggggagagctctcttgggaagaattcagtaggctccctcttgtctcacttggattttttaaagatgtagtctagtaggaatagacatttccctcatgaattattgataccctaaagcagttttaattgtttttcctttcagtgctatatagagaaactccataatgattctcactgcaatattagaatatattttaagcatgccataataccgagggaaagcatctaattttcctgaaacaatatgcttctttaacttcgagaaatatgatttaaattagcaataaagacgagaagtaatccaacttagattataaaattgctttctgtactgaaatattctgtaggaaaataagaaaagaatacatttatgtacaatttaatcatgtgaaagcatggttaaacattgaaatatgggatttgtagatataagataaatttcactactgcatgagggtcttttcttggtcacagattttaactctttatataacatttttttcaagcatgagttgcacaatatagtgaacctttgccacaaaacaacaaaaaaatgaaaaaacactgaaatatctgtaagtagctatagtcccactgtcaaaaataacaactctaaatattttgacgtatacttctagtcctttccattttacatacgtttatttttaaataatattctattatactttaatattttatagtctgcttctccctcttattaacagactgtcaatggctttccattaaaaaattattcttcaatgggatttttacactgtgaattgcaacgtatcataaggatgtttataatttacaaattattcttcaacttaggtaaattattccagttttttttactattgtgataaacattattaactgatcctagtacatatttcttatctcttctagaattccttaaagtaagtcagtgttataaataccaatatagaagcacgtaaatacgtggccttctgtgagtttatgtcaaattattgattagggagagacttctgcttccaaaatggcagcatagaagcaacctggcttcactttctacaacagaaaaccaaaaacaaatatatagtgctgaaattatcaccagcagtatcccacaactcaaatatgataaggcaacagtgcctggaccaacagagacatgaaaaaactttgagtagatggtaagagaattagactttcatctccacaacacctttcttcccaatctgcccagcactaagtgcacagaaagcttcttcctgactcatggtttttacatttgaaaaagggagattaaggtggacaactagcttccccaccaacttgggttccttggcaggagacctgtccctgcttcaaaccaaagaaagcatggcaagtgcctgaagggtgaaatatgcctgaggacagacagagacaaaggtggaaggtgggactatcattcccagctctgaaagctctgctctataactcagccaatggagagacattaaaaaaaattcattaaccaggaacaagtgggctttatcccagggatgccaaggatggctcaacaaacacagaaccaaaaataaaaccacatgatcatttcaacaggttctgaaaaagcatttgataaaattcaacatcttatggcaaaaatcctaacaaaactgagtatagaaggaacatactacaaaatgataaaggtcatatatgacagacccacagctaacaacatacttaactgaaaaaaattgaaaggctttactctaaaatctggagcaagataaagatgcccactttcaccacttttattcaaaataatactggaagtcctagccagaacaattaggcaggaggaagaaataaagggcatttgaattggaaagaaaaagtcatattagccttgtttgtagatgacatgatcttacatttaggaaaacctaaagactctaccaaatagttgttagaactgataaatgaattcagtaaaattgcaagatacaaaattaacataaaaaatcagcagcatttatacatgccaatagtgagtaatctaaagaaaaatcaagaaagaaatccaactttaaacagctacaaggaatatagaatgttaggaatcaacttaaccaaagaaatgaaggataacaagcaaaactgtaaaacactgatgaaataaatttaagaagacatacaaaaatgaaaagatattctgtacttatgaattagaaatattaatattattaaaatgataacactacccaagaaaatttacagattcaatgcaatgcctatcaaaataccaatgacattcttcacagacgtagaaaaagcaatcctaaaatttatatggaaccacaaagactatgaataggcaaagcaatcctgagcaataacaacaaaaaagcaaaactgaagacattacaccactggacaccaaaaaatactacaaatctgtagtaactaaatcagcatggtattggcataaaagcagacacacagaacaatgaaacagaagagagaatccagatattaatccatgcatttccagccacctcatcttcaacaaagacaccaaaaacatgcaatgaggaaaggacagtctctttaatgaatggtgttgggaaaactggataaccatacgtagaaaaacaaaggtagacctctatctctcactatatacaaaaatcaactcaaaaattaactaaagatttaactctaggccttgaaactttgaaattactagaagaaaacattgcggaaacactccaagacattggtctaggcaaaattttttgtgtaagcataggcaaccaaagcaaaaaaagacaaactttttatctatttatgtaaaactgaaaagcttctgcacagctaaggaagcaatcaacaaagggacaacctgcagtatcagagatattatttgcaaactatccatctgacaagggattaataaccagaatatatgtggagttcaaacaactcagtagcaaaaataatgataataataattacccacttgaaaaatgggggaaatatctgaatagatatttctcaaaagatgacacacaagtggtcaacagatatatggaaatatgctcaacatcactaactatatcagagaaatgcaaatcaaaaccaaaatgagatatcaccttaccctagttaaaatgcttttattaaaaagaaggaataacagatgctggcaaggatgtggaggaaggagaactctaatacactattggtaggaatgtaaattagtacagccgctatgaaaattcctgtggcggtttcttaaaaagcttaaaatagagctccatatgatctagcaattccactcatgagcataaaagaaaggaagtcaatatattgaagagatatctgcactttcatgttaattacagcactattcacaatagtcaaaatatgaaatcaacttgtgtccatcagtgaataaatggataaagaactgtagtatatataagcaatggaatatttttcagccacaaaaaataaaatcctgtcatttgcagcaacatggatggaaccagaggtcattatgttaagtgaaaaaagccaggcacagaaagaaaaatatcatgttttcactcatgtgtgggagctaaaaagtgaagctagatattagattggtggttatcagaagctgtgaagggtagcgaaaaggggctaataaaaataagttgattaatgagtacaaatatacagcttgatacaagaaatataacctagtgttagatcagtagactgactacagtttacaataatgttgtatatttcaaaactgctaaaaaagaataatttggatgtttctagcatagaaaaaagacaaatatttaacgttatagatatctcaattacactgatttgatcttcacaaagtatatgaatgtattcaattatcacatgtatcctgaaaaatatgtggatcaaccgaaaaatattttatatattttttagggctcagtcttaagccttattatggtctccgcctacactctctccctgaatgatctcatctacccccttagcattattacatctaccaaatgtgtatatccagccctgaactttcttctggatacagactcatgtatccatctccctatttgatgtctccaccttgaggtaccacaagcacgtaaaatgtgacatgtccaaaactgactcttgatgtttctcttttcctaagtcttttcctttttaatgtttttcttaccattaataacagctacgatttcctctaagttgcttaagtcaagaaaatggaaaacatttttgattactacctttctctcttttccgggagtcaatccatcttaagccgtctaatgctatcattgttttctgtatgccattgcttgttactaagaaagtctctctgtcacctttacaaaatgaaggaatttagattcgtataatccaagggctgtaattgtattgtctttgtgtatttcctgatgccattttcttttggaagtattattaaaatgttataaatcataggaatttcatttccatatactctaaggatatttaattaaaacaggcagatttattatcaaaaagtagaaagatttgtcaatagtcaaaggaagagaactgggttaggtatggcttatagaaaaatgagcctttctttgatgttagcatttgtttaaaggaacctgaaagcataatggcgtaagaaggtaaaaggaaagggaatgatctgcttaattgtacaaagcttcatgagcttcttttattactattattattatactactcaagaaacctataaagtgtatagatctttccctcttgtaactaaaaaaaaaagaaaaaaagtacgttttagtgataaactccttaccccattttttttttagcttaatgcattctaagtgtccacagcttaatgctaggaaaaataaaatattttggagggaaaggatgacatataagtctcctagcttgaccaaaagtctgataagattatttcattgtacaaatgttaaatatttattgaaaaaaacctaattgttatacttttgtctttctcagaaggagactaatatactatgttgtctagtttatttcatttaaaaaagataagttaattttttttttgctttgaatgtgttgttacttaaagaaaaaaagttcttctctgcactttaagaaaaatcgaactatgatgataaagtttgattgctaagcatgaaataatgttttgaggccaggtgccgtggctcacgcctatatcctagcactttgggaggccaaggcgggcagatcacaaggccaggagatcaagaccatcctggctaatacggtgaaaccctgtctctaccaaaaatacaaaaaattagccaagcgtggtagcgggtgcctgtagtcccggctactcgggaggctgaggcaggagaatcatgtgaacttgggaggcggagcttgcagtgagcagaggtcgcaccactccactccagcttgggcgacaaagagagactccgtctcaaaaaaaaaaaaaaaaaaaaaaaaaaaaagaaagaaataattttttgaaatagtcatttggctataactcttttaatagtcattaaatgagctaatggaagcttctttgaggaacccaggcagcccagacaagtgggcttcacacagcagcacaccctcttcaccaagggacagccaaagtgctttgttaaatgggttctggttcccatgacccccaactgagtgagatcccccaacaggggtaaccagataccctatacaggagccttcttactggtatcaggttggtgcctctcgaggtcggagatcccagaggaaggagcagggtgttttgctgttctccagcatgcttgggtgacatatccaggtgcagaagcaacccagatgaatagggcctaaagtgaacccccagcaaaccacagaagccctacagaagaggaacctgacaagtgaaagaaaaataagcaaacagaaagcaacaacagcatcaataaaaaaagtccccataaaaacctcatccaaaggtcagcggcttcagaaatcaaaactagacaaactcatgaagaagagaaagaattgatgaataaatgctgaaaacccaaatggccagagtgccttttctcctccaaatgacagaaacacgtctccagcaagggcacagagctggatggaggataagatggatgaattgacagaagtagacttcagaaggtgggtagtaacaaacttcgctgaggtaaaggtgcatgttctaacccaatgcaaagaaactaagaaccatgatacaaggttaaaggagctgctaactagaataaccagtttagagaagaacataaatgacctgatggagctgaaaaacacactacgagaactttgtgaaacatatacaagtatcagtagctgaatcgatcaaacgaaagaaagaatatcagagcttcaagactatcttgctgagataaggctggcagacaagattagagaaaagggaatgaaaaggaaccaacaaaacctctgagaattatgggactatgtaaaaagactgaacctatgactgattagagtacctgaaagagacagggagaatggaaccaagttggaaaacacacttcaggatatcttccaggagaacttccccaacctagaaagacaggacaacattcaaattcaggaaatacagagaactccagtaaaatactccatgagaggatcagtcccaacacacataatcatctgattgtccaaggtcgaaatgaaaaaaaaaaaaaaaatgttaagggcagccagagagaaaggccaggtcacttacaaagggaagcccatcaaactaacagtggatctctcggcaggaaccctacaagccagaagagagtgggggccaatatgaaacattcttaaagaaaagagttttcaacccagaatttcatatctggccaaactaagcttcataagcaaaggagaaataaaatccttttcagacaagcaaatgccgagggaattcatcaccaccaggcctgccttgcaagagcccctgaaggaagcactcaatgtgaaaaggaaaaaccagttccagcaactgcaaaaacaaatcaaaatacaaagatactatgaagaaactgcatcaactagtgcgcaaaataaccagctagcatcatgatgacaggatcaaattcacacataacctaaatgtaaatgggctagatgtcccaattaaaagatgcagactggaaaatttgataaagagtcaagacccatcagtgtgctatattcagaagacccatctcacttgtaaagacacacacaggctcaaaataaagagatggaggaatatttaccaagcgaatggaaagttaaaaaaaaaaaaaaggcaggggttacaatcctagtctctgataaaatagaccttaaaccaacaaagatcaaaaaagacaaagaagtgcattacataaggtaaagggatcaattcaacgagaagagctaactattgtaaatatatatggacccaatacaggaacatccagattcatttaaaaaacaaaaagttatttgagacctgcaaagagacttagacacgcacacattaatagtgggagacttcaacaccccactgtcaatatgaaacagatcaatgagacagaaaattaacaaggatattcaggacttgagctcagctctggatcaagtgtacctgatagatatctacagaacactctactccaaaacagcacaatacacattcttctcagtgccacatagcacttattctaaaattgatcacataattggaagtaaaacactcctcagcaaatgcaaaagaactgaaatcataacaaacaatctctcagaccacagtgcaatcaaatcagagctcaaaattaataaattgactccaaaccacacaactacatcaaaactgaacaatctgctcctgaatgaatactgggtaaataatgaaattcaggaagaaatcaagaagttctttgaaaccaatgagaacaaagacacaatgtaccagaatctctgggatacagctaaagcagtgttaagagagaaatttaaggcactaaatgctcacatcagaaagctataaagatctcaaattgacactttaacatcacaactaaaaatactagagaaccaagagcaaacaaatccaaaagctagcggaagagaagaaataactgagattggagtggaactgaaggagatagagacacaaaaaacccttaaaaaatcagtgaatctaggagctgtttttttgaaaaaattaataaaattgatagactgctagctagactaataaagaagaaaagagagaagagtcaaatagacacaataaaaatgaggaaggggatatcagcactgatcccactgaaatacaaacaaacattaaagaataaacacctctatgcaaataaactagaaaatctagaagaaatggatacattcctgaacacacacaccctcccaagactaaaccaggaataagtcaaatccctgaatagaaaaataacaagttctgaaattgaggcagaaattaatagcctaccaaccaaaaaaaaatcccaggaccagacggattcacagccaaattctaccagaggtaaaaagaggagctggtaccattccttctgaaactattcaaaacagttgaaaagaagggactactccctaactcattttatgaggtgagcattatcctgataccaaaacgtggcagagacacaacataaaagaaaacttcaagccaatatcgctgatgaacatcaatgtgaaaatcctccataaaatactggcaaaccaaattcagcagcacatcaaaaagcttatccaccacgatcaagtcggtttcattcctgggatgcaaggctggttcaacatatgcaaatcaataaacataattcatcacagaaacagaaccaataacagaaaccacatgattatgtcaatagatgcagaaaaggccttccataaaattcaacattgcttcatgttaaaaactctcaataaactaggtattgatggaacatatctcaaaataataagagccaatattatactgaataagcaaaagctggaagcattccctttaaaaaccagcacaagacaaggatgccctctctcaccactcctattcaacatagtgttggaagttctggctagaacaatcggtcaagagaaataaataatgggtattcaaataggagaggaaatcaaaatgtctctgcagacacatgatcctatatctagaaaacctcatcatcgtctcagtccaaaagctccttaatctgacaggcaacttcagcaaagtctgaggatacaaaatcaatgtgcaaaaatcacaagcattcgtatacatcaataatagagagccaaatcatgagtgaactcccattcacaattgctacaaagagaataaaatacataggaatacagctaacaaggcacatgaaggacctcttcaagaagaactacaaaccactgctcaaggaaataaaatgggatgcaaacaaatggaaaaaaattccatccttatggataggaggaatcaatattgtgaaaatggccatactgcccaaagtaatttatagattcattgctattcccatcaaactaccattgacattcttcacagaattagaaaaaaaatactttgaaattcatgtggaatcaaaaaagagcctgtatagccaagacaatcccaagcaaaaagaacaaagcaggaggcatcacactacctgacttcaaactatgcttaagctgacaggcaacagtaaccaaaacagaatggaaccgatacccaaacagacatatagaccagtgaaacagaatagagacctcagaaataagaccacacatctacaacccttggatctttgacaaacctgggaaaaacatgcaatggggagaggattccctatttaataaatggtgctgggagaaatggctagccatatgcagaaaacttaaactggaccccttccttacaccttatacaaaaattaactcaagatggattaaaaacttaaatgtaaaaccaaaaccataaaaaccctagaacaaaatctaggcaaaaccattcaggacaaaggcatgggcaaagattttatgatgaaatcaccagaagcaattgcaacgaaagctaaaattgacaaatgggatctaattaaaccaaagagcttctgcacagcaaaagaaactatcatcagagcaaacaggaaacctagagaatgggagaaaaattttgcaatctacccatctgagaaaggtctaatatccagaatttacaaggaacctaaataaatttacaagaaaaaaacaacaaccctatcaaaaagtgggcaaagggcatgaacagaaacttctcaaaagaagatatttatatgtccaaaaaacatatgaaaaaaagctcaacatcactgaaccttggagaaatgcaaatcaaaaccacaatgagataccatctcacgccagtcagaatgagtaaaaagtcaaaaaatgacagatgctggcaagagataggagaaataggaacacttttacactgttggtgggaatgtaaattagttcaaccattgtggaagacagtatggtgattccttaaggatctagaaccagaaatacaatttgacccagcaataccattactgggaatatgcccaaaggaatataaatcattctattataaataaacatctatgtttattgtggcactattcacaatagcaaagacaaggatccaacccaaatgcacatcaatgatagaccggataaagaaaatgtgttacatatatgccattgaataccatgcagccataagtaggaatgagatcatatcctttgcaggggcatggattacgtttgaatccatcatcctcagcaaactaacacaggaacagaaaaccaaacactgcatattctcactcataagtgggagctgaacaatgagaacacatggacacagggaggggaacatcacacacaggggcctgtcagaggggaaaagggagagagagcatcaggacaaatagctaatgcatgcagggcttaatacctaggtgacggattgataggtgcagcaaactaccatggcacatgtttacctgtgtaacaaacctgcacattctgcacatgtatcctggaacttaaaataaaataaaataaaatcttctttaaaatatttaatatttgataaatgaatacagaagaattataagtatctcatttgtgtaacatttactttaatcaaagtaaatctttctttttttttaacgttcttttccatggaatactatgcagccataaaaaatgatgagttcatgtcctttgtagggacatggatgaaattggaaatcatcattctcagtaaactatcgcaagaacaaaaaaccaaacaccgcatattctcactcataggtgggaattgaacaatgagaacacatggacacaggaaggggaacaaagtaaatctttcaatgaattaagttgctttcgaattttggcttaaagaaattatgcatcttttctttcaccttattgccatgaagaacataatatatgttagtttctgatgagtcagaaaccactctaacggttagtagttttcaaacaacaataatttattatttcatatgattcttcttctgggctgtttcagctgaagctggatggtctaggatggcttcaggcagttgactcagtgtcaccttgagtgatggaggtgatttggctataatcatccaggaggctagccagggcttgttcacatgatggcaattgcagaattccaagtgcagaaaatgagggcaagctccaatatgcaagtcttttaaagcctctgcttgtatcatatttgttcatgtctcattgaccaaagtaattcacatgaccaagcctagaaagaacaggtagattcacgaaatagaccaaccgttgatggaaggaactacaaaatcaggttgtaaaatgatatgtataaagagatggaacatttgtagcaatttttaaaatctactgcagactgttttcagccacaaattatattctcctaaatgaaaaatatgcttacttccagaatttcagtagtctcattcaattatgtcatctggttcaaagtccaggttcttataatttgtttctaatataggtataaatatgacccattggatgcagctgctcttcatccagagacttataaactaaaaatgtaagttaccagtggtcaaccaacctaatatacaagggtgagatgggagcagagtaattgtaatagatacttctgatcagaaaaatgaggaatgggaggcatagagcagccattggtctaacaaattctgaaatccatccaggtacatgttaaaaggatcccctgctctaagtctgtgtaagctccttgattgagttctatttcggctccttgagagtgatttgtctgtctgtttttctctggatctcttgcctccacctctaggattttcatccttcgaactagaaacggccatgattctcagtctgatttctgcccccaaaatgttggaagcctagaaaactttctttttgtaattgattttagtccaagctggcagtgatttgttagtataatggtctttaaaaactcatggattgcctatggatctgatttacatctattgtatgtaatttctaaaattctccacttccaaaattcacatctaaatcatttcaaaacaggccttcctccactttagatgtggtaggctgctatgaaaaaaaaaatgcccttagaattattaggagacaatttatcttgctgaggactcttctgtccaccttagaacttttagaggttttttaaaaatgaatcttataaccagccacatctttgtctgtctttatactaggccatttcctactttgtgaattttaaccaacgtgggagacaatttattttttgacccagcaattcctggcttctttttatttcttctaaaatctgcttgtaaacaaaactgttcatttttaaacttattctgtctgtttccatattattatatgcagctaacaggggccagttgacacactcagcatctatcatcaaatctttttagaggcacaagttcattaggtacattttctatcttccaagtttctgcagatgaaagctttgccaaatattccactatagcacaactttgtctgccactgtctcaaccttcactaacagtttcttcactgttttttcagcctccatccaaagccaatactatgtattttagtattttattagatgttttaggttttgttatagcaacaccccacaccgggtactagtttttatatcagttaacttctgttgtgttaaacaacaatttgctttagacagtaaatatttatttttatgcttcagcggttcacctggctggttcttggttcttctctgagccagattcattggtgctgggttttcagatagcctcattcatgtatcgggcagtaggcttgctgtaagttggatagtggcaatgactttgccaactgtttcttcatccagcaggtttatttggactcattcagtgattacaacgttctcaagatcagagagagaagtctcattttggtttttagccactgcttatgtcacttttgatatgtccctttgcccaaagcaagtcacatggccaagcccagattcaagaaacagtgaaaaggtttccaccttctgacgaatggagctgcaaagtaacattacaaagggaaggatgcataaaaaggcagaagaatgtccagccatttttgcagtctatcacagcaagcatattttatgtaagacctgagtataattttttattgctaatctaatcattagagtttgctaaatttcctatgctatgtttatgggaaagattattattgtttccataaattatgtaaggctatgagaatataaacgtatgtgtttaactgaatggaattataaatattaataccctttaaaagaacttgtgaagtggaacctatgttgcaaatcctgtgaacttaatcactaatactccgcctactctatcttagtgaaattataaaaggttatctctctgagaaacagtttatatccattttgattgtgttgttctgtaggggcaatttaaatgcaatttccaagattattaattgactttaagactttgggctagtattaaattaagttaatgaacaagtaatccctctaattaaagtaaaaatttcagcaagttatgtgcatcatcttatgctgttaagttaatattttcaagctaaagttgaaagctttaatttagtatctgatcatacatttttataaggttatgtaaacatatccaaattactagacaaataaagcttggtatgataaagagtagaggattaataatttaaaattggtctggaagtatttagccatttcgtaaaaaaggctaatggattattctgtgtaatcagcccagattgcagagttttcttaacccatcagaattctctctcctgcaatcctgttgttttcatcctacttataaattatttgataataaacaataaaatgtttcacttctgaaataagtagttttatgttaccttcttctattatttaatataccatcactctaatagaactcaagactacaataatttacccatgacttattctcatattttgatatagtgatcagtgtcctctcaccaatctttttgatattgcgtttcccaaactcaagcatgaaatttaaaataataaaactgtttagatatatttgacatccttactcttttgtgcaatatttgctcattttccttctaacgaggagtgactagaaataattagataggtttggtattttctattgtttattagatcaccacaattgtgaaagagagccattctatttgtcaaaccaacagtataggaagagctgtcaaatcaaaaagagaagctcaacttccataggtcaattatgtacaagtaagatactgttaataagaacttatttccagtcattcggtttcaggatagactgaagtgttctcacgttcatgtgcaaagcctggcatgatattgctagaacaaatcgattctttaaaatgttgtctttaggtttttaatacccttctcagctggctgcacatgtaacacatattctactgaatggctcgaaagctctggaggtttttcagtgttcctagtgttcacattatgttcttatatacagggtaaactttaactggatcctttctaaaaaatgatagattatgcctcaacaggaaattttaatctcctctgttcttatatttttggtgactattataaaatttacagtgagcattcagtcatgtcatataaaacatgttcccctcaaccacaacattgcccttaaagctcatgctatataagctataggaaagaaattacatcttttggaggaaacttctaaggaatgataatctcagtaaggactatatcagctactgtaggctcttggtagttaaaggagtagattaatgcttacaagagtcccggtgtaagctgccattaccacctgccagactatgccagaggactaaatcagaatttccaaaacaccatggtccaggagtggatggcttcctgcatgcttattgatgcctttggttctgaagggataaaaattaattatgcgagactaaatgaaactgataacaagatttcagttgttttttgtttttggttttgagacggggtctcagtctatcacccaagctggagtacagtgacataatcgtagctcactgcagcttcaacttcccagactcaagggatcctcccagtttagcctcccaagtagctgggaccacagatggataccacaatgcccagctaattttgacttttctggagagacggggtctccctctgttgcccaggctagtctcaacctcctgaactcaagcattcctcctgcctctgcctcccaatgtgctgagattacaggaatgagatagcacatgtggcttaattggtatttttaattgaaatattgatggtattgtttataatgttcaaaattctgatggtcatctggaggaagtctttttcctttttatcatatatgtaaaacccttgtttcagcaaaataaatttgtacaaactggaataaaacacttttataatttcctctaactcaccattcagaattcaagaaaggtgttctatgagaaatattaaaaaattataaccctatgaagcaaagatggataattacgtagaatattaatgcttattgatggttttgtctggaaaactgttcaaaatgtattcaaaaatgctcaaactggcattaaaacctatattaacagatgtactctatatttatgaaattttttctcatacttcctaccaggataaaatcagataaaatatgtaagaaatattacatttaaaggcaaatcttatttaattaactaagacaagtccacagttaaataaaaaggacagtgtgtaaataatgcctacaaaatcatttcaagacatttctctccacctactctgtagctcattgagcttatccttacatgtaatcaagacatcactttctagaaaatcagaaacattggtaaacttagggatctcaaatttggatttgaggggaattttcctatagttaaaagcactgagggtaaaacacaaaagaggcaaattgaatggttcttggttctactctttggaatacaggaactggtgaaaacaataaaggtatttatgatataataaatgtgacttgaaaaatgtcaccaggggatctgcaaagctaataaataaaagtaaattccctaatcttaatattgtatgattctagctatgttaaatattgtaacaagaatgtctttgaatatttatcaaactgcaaagcaagaaaacagttctgaaggagaaatacataaattaatactactgaatcaaaatattggaaagcaaatttgtggtcaaatttgtgccttagggaggactaggactacaactagggtctgacttcactctttctgacttacttttttttttttattaaatcttttctaagacatggcttatgatttagagatgggccctgaaaagcagaagctttctcttatcaggcatttctacaaaggtaatgaaaagcaacagagtccttatgaaatccctgtttcctgaaacaagctctaaatgagagagggtgttttgctacacaaaccccgggaaattctggttttgttttattgaagaaaccaacccaaatattatgatatcaaaatgtttcatggtcaaataataatttgaactataaatgctctgatttttctctgattattctgttagcctacttgaaagctaaatgcccttgcataatatccttatgaaaacctttactcagcaaccaaaattacctatttggatttcttatttttaatatgtaaaaatgatttgttgtttgtcattagagttatttgtatgcatacataaaaatatgggtacaatttctgactatatggaaatcaacatattcctacactcatgccatgtcttctatgagggctcctactgtgctgattttaccacctattgtaggcagactaatgccctttccacccaaagatgcccatgtcctaatctccaactggtgaatacgttaggttatatggcaaagggaaattcaggttgtcaatgaaattgaggttgctaatcaactgaccttaaaatgaggaaattttcttactgggtggggccaatctaataacaggtgggggataagtcaaattcagagagctatttgaacatgctatgctgctggcattgaaggtggtggaagaagccataagccagggaatgtaggtggtcactagaagctgggaaaagcaaggaaatagattatctccaagagacttcagaaaggaatacaaccctgatgatgccttgatttagcccaaggggaccagtttcagacttctgaagtcaagaactgcatgataataaaacatgtgttgttttaagccactaaagttgtggttatttattataacaggtatagcaaattaatacacttcagtatttctgatactcattaggataatagtccaaatccctcccatgtcctaagaggcattgcataaacaagtcccttcttcccctctcatggcatcttgccacattcctctctttgttactgtgctcaagcaatgctaacattctctcatttccttgaatgtgccaaattcttctaccagaggatgtttgcccttgccattcctttgtctagattgtttctcctcctactctttgctagactggctctttctcattcttcaagtggtgggtgtatgttatctttacagtaaggcatctgtgaccactcttaaaatatctcacacacacacacgcacacatacagagcttttctagtattcttattgtcaggcctctgagcccaagctaagccatcatatcccctgtgacctgcatgtacacatccaggtggctggttcctgccttaactgaggacattccaccaccaaagaagtgaaaatggcctgttcctgccttaactgatgacattgtcttgtgaaattccttctcctggctcatcctggctcaaaaactcccccactgagtaccttgtgacacccagtcctgcccaccagagaacaactcccctttttcctttacctacccaaatcctataaaagggccccacccctatcttcctttgctgactctcttttcagactcagcccacctgcacccaggtgaaataaacagctttattgctcacacaaagcctgtttggtggtctcttcacatggatgggcatgaaatttgttgccgtgactcagattgggggacctcccttcggagatcgatcccctgtcctcctgctctttgctccgtgagaaaggtccacctacaacctcaggtcctcagactgatgagcccaagaaacatctcaccaatttcaaatccagtaagcggcctcttttaactctcttctccaacctctctcactgtccctcaacctctttctcctttcaatcttggcgccacacttcaatttctcccttctcttaattttaattcctttcattttctggcagagacaaaggagacacgttttatccgtggacccaaaactccggtgctggtcacagactagggatggcagccttccctttgtgtttaatcattgcagggatgcctctctgattattcacccaggtttcagaggtgtcagaccacgcagggatgcctgccttggtccttcacccttagtggcaagtcctgtttttctgggggaggggcaagtaccccaaccccttctctccgtgtctctaccccttctccacttttctgggggaggggcaagaacccctcaaccccttctccttcacccttagcagcaagttccatttatctagggggcaagaaaccccaatcccttatttccatgccccgacctcttatctctgcaccccaatccttatttctgtgccccaaagtcttatctctgcaccccaaccccttatttccacaccccaacccctttcccacttttctggagggtaagaacccctgaaccccttccctccatgtctctactctctcttttctctgggcttgcttccgtcactataggcaaccttccaccctccattcctgcttcttctctcttagccagtgttctcaagaacttaaaacctcttcaactcacacctgacctaaaacctaaatgccttattttcttctacaatgccacttgaccccaatacaaacttgacagtggttccaaatagccagaaaatggcatttccattttttccatcctacaagatctaaataattcttgttgtaaaatagccaaatagtctgaggtgcctgacgtccaggcattcttttacacatcagtccctccctagtctctgttcccaatgcaactcatcccaaatcttccttctttcccttccacctgtcccctcagtcccaaccccaagtgtcgctgagtctttctaatcttccttttctacagacccatctgatctctccccttctagccaggccaagctaggtcctaattcttcctcagcctccactcctccaccctataatccttttatcacctcccctcctcacactctgtccaggttacagtttccttccgtgactagccctcccccacctgcccagcagtttactcttaaaaaggtggctggagctaaaggcatagtcaaggttaatgctcctgtttctttatcccaaatcagatagcgtttaggctctttttcatcaaatataaaaacccagcccagttcatggctcatttggcagcaaccctgagatgctttacagccctagaccctaaaaagtcaagaggccgtcttattcttaatacacattttattacccaatctgctcctgacattaaataaaactccaaaaattaaattccggccctcaaaccccacaacaggacttaattaaccttgccctcaaggtgtgcaataatagaggcagccaagtagcaacatatttctgagttgcaattccttgcctccactgtgagacaaaccccagccacatctccagcacacaagaacttccaaatgcctaaaccacagtggccaggcattcctccagaactgcctcccccaggagcttgctacaagtgccagaaatctggccaccaggccaaggaatgcccgcagcctgggattcctcctaagccatgtcccatctgtgtgggatcccagtggaaatcagactgttcaactcacctggtagccactcccagggcccctggaactctggcccaaggctctctgactccttcccagatcttctcggcttagcggctgaagactaacactgcctgattacctcggaagccctgtagaccatcacggacaccgagctttaagtaactctcacagtggagggtaagtccgtccccttcttaatcaatacagaggctacccactccacattaccttcttttcaagggcctgtttcccttgcctccataactgacagccaggcttctaaacctcttaaaactccccaaactggtgccaacttagacaatactcttttaagcactccttttagttatccccacctgcccagttcctttattaggccgagacactttaactaaattatctgcttccctaactattcctggactacagctatatctcattgctgcccttcttcccaatccaaagcctcctttgcatcctcctcttgtattaccccaccttaacccacaagtataagatacctctactccctccttggcgaccaatcatgcaccccttaccatctctttaaaacctaatcactcttaccctgctcaatgccaatatcccatcccacagcatgcttagaaaggattaaagcctgttatcactcacctgccacaccatggccttttaaagcctgtaaactctccttacaattcccccatttttcctgtcctaaaaccagaaaagccttacaggttagtttaagacctgcaccttatcaaccaaatagttttgcctatccgccccatggtgccaaacccatatactctcctatcctcaatacctccctccacaatccattattctgttctggatctcaaacatgctttctttactattcctttgcacccttcatcccagcctctctttgctttcacctggactcaccctgacacccatcagtcccagcagcttacctgggctgtgctgccacaaggtttcaaggacggccctcattacttcagccaagctctttctcatgatttactttctttctacccctccgcttctcactttattcaatatattgatgaccttcttctttgtagcccctcctttgaatcttctccacaagacacacttctgccccttcagcatttattctccaaaggatatcaggtatccccctccagagctcaaatttcttctccaactgttacctacctcagcataattcttcataaaaatacacgtgctctccctgccgatagtgtccggctaatctcccaaagcccaatcccttctacaaaacaacaactcctttccttcctaggcatggttggatactttcgcctgtggatacctggttttgccatcctgacaaaatcattatataaattcacaaaaggaaacctagctgaccccatagatcctaaatcctttccccagttctctttccattccttgaagacagctttagagactgcccccactctagctctccctaactcatgccaatcgttttcattacacacagccgaagtgcagggctgtgcagtcagaattcttacacaaggaccgggatcgcatcctgtagcctttttgtccaaacaacttgaccttactgttttaggttggtcatcatgtctccgtgcagcagctgctgccgccctaatacttttagaggcccttaaaatcacaaactgtgctcaactcactctctacagctctcataatttccaaaatccattttcttccaaacacctgacacatatactttctgctccctggctcctttagctgtactcactctttgttgagtctcccacaattaccattgttcctggcccaacttcaatccggcctcccacattattcctgataccacacctgaccctcatgactgcatctctctgatccacctgacattcaccccatttccccacatttccttcttccctgtttctcaccctgatcacacttggtttattgatggtagttccaccaggcctaatcaccacacaccagcaaaggcaggctatgctatagtacaagccactagcccgcgtcttaaaacctctcatttcctttccatcatagaaatctgtcctcaagtaaataacttctcagtgttccatctgctattctactacccctcagggattattcaggccccctcccttccctacacatcaagctcagggatttgaccccacccaggactggcaaattagctttactcaacatgccccgagtcacaaaaactaaaacacctcttagtctaagcagacactttcactagataggtagaagcctttcctacagggtctgagaaggccactgcagtcatttcttcccttctgtcagacataattcctcagtttagccttcccaccgctatacagtctgataactgaccagcctttattagtcaatcagccaagcagtttttcaggctcttagtattcagtgaaatctttatattccttacagtcctcagtcctcaggaaaagtagaacagactaaaggtcttttaaaaacacacctcaccaagctcagccaccaacttaaaaaagaacagacaatacttttaccactttcccttctcagaattcaggtgtgtcctcagaatgctacaaagtacagcccatttaagctcctgtatagatgcacctttttattaggcccccgtctcattccagacaccagaccaacttggattgtgccccaaaaaacttgtcatcactactgtcttctgtctagtcatactcctattcaccgttctcaactactcatacatgccctgctcttgtttacactgccagtttacactgtttctccaagccatcacagctgatatctcctggtgctatccccaaaccgccactctaactcttaaagtaaataaataatctttgctggcagggctatgctgaacctccttaggcactctctaattagatgtcctggatcctcccaattcttattcctttagtacctgtttttctccttatcttattccgtttagtttttcaattcatacaaaaccatatccaggccatcaccaataattctaaatgacaaatgtttcttctaacaaccccacaatatcaccccttaccacaaatcttccttcagtttaatctctcccactctaggttcccacgctgccccaatcccgctcgaagcagccctgagaaacatcgcccattatctctccataccattccccaaaattttcgccgtcccaacattttaccactatttcattttatttttcttattaacataagaagacaggaatgtcaggcctctgagcccaagctaagccctcatatcccttgtgacctgcacgtacacatccaggtggccggttcctgccttaactgctgacattcgaccacaaaagaagtgaaaatggcctgttcctgccttaactgatggcattatcttgtgaaattccttttcctcgctcatcctggctcaaaagctcccccactgagtaccttgtgacccccccactcctgcccgccagagaagaacccccctttttcctttacctatccaaatcttataaaacagccccacccctatctcccttcactgactctcttttcggactcagcccacctgcacccaggtgaaataaacagctttattgctcacacaaagccggtttggtagtctcttcacacggatgcgcatgaaacttattcgttttttctgcttctattactatttgatactctcttattcagctgtttacctttgtttctcacccctgcttgaatgtaagctccacaaaattggaaacaaacttgttttctgttgagtgcccagaatataaactggactcttatacacatgaaaagctccatagttattgaaggaaataagcagagtgcttcaacaataccaaatgacttgtggctatcaaaatgttgtattagtccactctcacattgctataaagaactgcccgagactgggtaatttataaagacaagaagtttaattgacttacagttccacatggctggggaggcctcaggaaacttacaatcatggcagaaggggaagaaggtacaccttacatggtggcgggtgagacagagcaagcaaagggggaagacccctgtataaaaccatcagatcttgtgagaactcactcattatcatgagaacagcatgggggaaactgtccgcatgttccaatcacctccgaccagggcaaagggggaagacccctgtataaaaccatcagatcttgtgagaactcattcattatcatgagaacagcatgggggaaactgtatgcatgttccaatcacctctgacaagggcccttcctagacacctggtgatcacaatttgagaagagatttgggtgaggacataaagccaaaccatatcagtgttcattcttgcctatatgccttgtgaacatagtattcactctgttttgttccccttgcctgctgagacaatgccaatgtgttctttaatatttaattttaatgtatcatctctctgaagattttggtgactgtcttcatttctatttcagtattcattgctatgtaaaaaaccatccccaatcatagtggcttaaaacactcatagtttattatttctgaaatatctcatctttattaggcttagcttggtagttctctgctctgtgtatggtcattcacttagcagcattgagcttggaagctggactggctgatctgaggctaaaaggacaaataagactttactaaatggtttagtgtcactccatttggctagtgtgggcttcctccaagcatcatggtttcagactagtgtcccttcttatatggcagctaatttcaagagagaacatgaaatataccaggttcttaaaatcaaaacccagaatggaactggcacaatgacatatctgccacattctatcggccaaagaaagcaacaaatacgcctagtttcaaaaacaggtgtgatcattcattttgattcagccacagagtgcccagatattttttcaaacattattctgggtgtatctgtggtgtgtctggatgagattaacatttgaattggagtaaaggagattacactttctaatgtgggtggcccttatccaatcagttcaaggtctgaatgcaataaaaaggctgacccttccttgaataagagaaaattcctcctatctgcctatctttgagctggcacttcaactgtttttcctgcttttggactcagattgaaacattagctcttctaggacctcaaaccttccaacctttgtacaagaagtataggaactataccattggcttccctgagtctctatcttgctattcatcacacatatcttgggactttacagagtatgtcattggagaatacataattgcatgagaattgcacacacacgtacatataacatatacatatatttataaaacatatacatgtaataagtctacataaaatggtttgctcttcctttgaagagcaacagcatcctgagctctcctgttatgccattcactacatacctctacaatttgatgatttatctatcttttctactggatttttaatactttaagaggggagataacatttctctctacatgtctagcatttgatctcaatatagtatttaatgatacttggtgaatgaatgaataataaatgtactctatatttataaatttttaattcttacttttataaactttataattcctttttaacttccatttagttactatatactccaagaaatacactgcactatttctctaagacaccatttctacctttaagatctttaaataattcagaacaatatagaaccaataatacacaattgttactgtgcagtatctcttctccatttgagccaaaagaagataacctggttctaactaataacattatcctataaaacattttttgagataaattttaaattataaaattatttttatacttagaaaattttaaaaatcacactaaaatagctatattttttaaatctatgaaagaagatcatacacttttctaaagattttgtgctgaattgatccttctttgtctgaaaatattagatatcccagtgtcagaattatcatggggtgtaaagacttcagcacatatctcttataaagattatgtctgggctaatatccctcctacctcattctttcccctcacactgtgacctctgcatctttaacaaagaaaagacaataaaagacaattttagagctttggaacggcctgaagtttgctttatcaaggacaatactggcaactttccagaaacctggaggccatggctcatctgcaaatcatgtacatatatttgcatgaattttattttgattagtagcctcaacccatgatggtacttaggaagaatgaagcattttacatatatgaataaatgaagacaatttagtagtcttaatgctcatggctgtattttccctatttcttaagtctaattctcctcatccatccccttcttgttattccttctctttaaattcatatgggtgttgcttttcttttttgttgttgttattttctttttttagcatactgattctgtgtagatggtgggaaggaagttgccctgctattgtgttttattgatccatttaacctagatctattataaaatcattattacttagtgatttttgcaaagtttttttttttcatctcaactgaaatgaattggcatctttttgggctgagtcagtggaatacgtgaagcttgaaatctgtgcaattttgttttgaagaggttgtctttaaggtgctccataaactaaaatataattttagggacaaatatgtaaaagctgcatataaatgtgctaaaataggcaaaaaagaattactattctattaacagcttttaatttttatgaaactttgtattgaaataatagaaaattcttgagagcatatgagaagtgattaaatggtggttaataactagtttaatgaccagtgatgtaagtctgtaaactttaccaaaaaatccttatgcacttaatgtagtcaatgactgataaagaaaatgatttttctctgtgtattcaatgtagatttttcccagagaatgaaaggcaatcaattctagatttggggaaacaaaattttttcttccttaccttgctaattcattttgtgttctttcctcttttctattcttttctctcttattttattcttttacagtctgacacacttaatttctttctaagccgggcacagtggctcatgctagtaatcccagcactttgggaggccaaggcaggtagactacctgaggtcaggagatgaagaccagcctgaccaacatggtgaaaccccatctctactaaaatgcaaaaaattagccaggtgtggtggcgcatgcctgtaatctcagctactcaagaggctgaggcaggataatcgcttgaacccaggaggcggaggttgcagtgagccgagattgtgccattgcacactagcctgggcaacaaaagtgaaattctgtctcaaaaagaaaaaaaaattctagtattttagtatagtcagattttctacaagcaataatatatttatgtttgtattagttatttctcagtagggcctagtttatttataaggaataatatttatttattcctcttgtatttggagcaatggaaaaacatatgaaattatttcagaatatgattaatgtctcccatttataagctgtaaagatggtaatacagttataaatatttaaagataaaaatccacaaatattatagagaactcaatgttacaaagtaatagaaatattactgtgaatagtaatttaggaatttaggttaaaatgaatttggaatttggatccattggtgtttgatcacagaagcagatgacaaggagagatatagaataaagaatttattatgaggtaatcctttacacaactatgggatctgatgaggaagatcatggagaggctgttgtacctgaagtcttgttggttgtcagagtcagcagttgtgaaggagggctgcactggatagagtagaattgagtggaaataaactaggactcatcaggataaactggaactcatgaggataaattagaactcaaatctgattttcacaacctctaacctggcctaagggacctacaggagaatgtagtgccctttgtcacagagttgctaatgcccttgttccagaacgtgaaaattccaaaacggaagatccagtaggatctggagggcttctcagcctggctgctgccacataacaacaaggtgagctagtagatgcacaaaaacatgagaaagcagaagcaatatctagtgccctacactgaatttcagaaggtccaccttctgctttacttctgccgtctgaattttttgcaaatttctcttgcagcctgccctaaccaggaaccataccagaagagcatttggagaaaagtactttcagcttaacctaagctgatacagaaaaatacatcaccatcaaccttttgtctacttttcaaacatatgaacttctctcgattatatacccatcattcaaataaagacaatatttgagtcaccaaaagtgccgtgcaacctcctttgtccaactaattgcattataaacttttctgcagaagaaaacacaagtcctttattgatcttaggatggttttactcttcttctagctgacatcttcttccctttcaatattccatcacttaaatattgattttttcttggggaaaattttcataagtattgtatatttctgcatgtcaccaaagacattaacagctattttactttgtactgtctttccaaggacatttggaagacagaaattgttacctcttaggatagtaaaaatagaagttattattctagagtaagaaagaaaatgtttttatccagaggggagtataatccaagattttcctctatacaatctaggactcctaatatcagtattaccttcctgcaatgtcttcaatgcaatgggcaggcaacacatagctctcatcacatcacatcattctgtaagaattggggcttgaataacattggggcacaatactgttacttaggctagtgctattgttgtgagtaataaactgtcttttgtccctgacccaggcatgtcatgtcttctgctagtatctatggaactggctaatctgttaacttgcaagtagggtaaaaactcagaccctgaacactttctagtgacactgagatatcaaattgaaattaaatcatctatatacatgtaacatgccatatagtatgaaaataaggaaaatggttaatgtatccagaaaaatatccatgtgaaaataataaagtaacattcatagctattatgatgctcttttctacaactggtcacatggttgtagctgatatttatgactttcttctgccattgctgatccatatttccttagttctcacaaagctctagttggttgtggtctcttgtctgtcagagtgagccaaatcttcactgttgttcttaaattgatacaaaacatttgtttggatttatggggtacatgggatattttattacatgcatagaatttgtaatgatcaagtcagggtatttagggtatcatcactttaaatgtttattatttctttgtgttgggaacatttcaagtcctcttttccaggtcactaaaagggcctaatagacagagtacatttcatccaacagcttcataatatacatctttctatttagtacataaaatagtgtccaggataggtgacatgttaagccacaaatagagtcttaataaattaaaaaaatagaaactatgtcaagtattttctcaaataacattgtaataaaactataaatcagtaagaagaaaaaatttggaaagtatacaaatacatgaatattttatcaattaataatgtaataaaattataaatcagtaacaagaataatttggaaagtatacaatacataaaaattaaacaacatgcccctgaatgaccattgagtcaatgaagaaattaagaggaaatcaaaatgtttcttgaaaaaaataaaaattgaaacaaaaaataccaaaacctgagatacagcaaaagcagtactaaaaaggtttataataataaatgcatacatcaaaaaagtagaaatattcaaataaacaatctaatgattcacttcaaggaaccagaaaagcaagaatgaaccaaatccacattagtataaggaaagaaataataaatatcagagcagaactaaacaaaacagagactaaaaacatttacaagaaatcaatgaaacaaaagttgttttttgtaaagataaattaaactgataaacctctagctagaataactaagacaaaaagataaaagacccaaataaataaaatcagatacaaagacattacaattgaaacaacagaaatacaaaagatcatcagagactgctatgaacaactatactacctaactggaaagcctacaggaagtggataaatttctgaacatatacaacctagcaagattgaatcagaaaaaaatagaaaacatgaacagaccaataatgagtaatgaggttaaatcagtgataaaaagtctcacaacaaagaaaagccaatgaccagatggcttcactgctgaattctatcaaactattaaagaaaaactgacaccaatactcttcaatctgtttcaaaaaattggagagggaaaggaacactccctaattcattctaaaaggccaacattaccctgatactaaaaccagacaaggatggaacaaaaaaagaaaactacaggccaatatctcttatgaccatagacataaaaatcttcaatacaatattagcaaacttaatacaacagtatatcaaaaagatgatacactatgatgaggaaagatttatatcagggatgcaaggatggctcaacatatgcaaatcaataaagataatatatcacatcaacagaatgaagaacaaaaactatatgattacctcattagttgcagaaacagcatttgaagaatttcagcatccttttgtgatgaaaactctcagcaaattaggcatagaaggaacatatttcaacataataaaggccatatttgaaaacccacggctaatatcatactgaatgaggaggaacggaaagcctttcctgtaagaactggagcaagacaatgtccactttcaccacacttttttaatgtagcactagaagttctagctggagaaatcagacaagagaaagaaataaaaaacctccaaaccacaaagaaggaagtaaagttgttttatgcagatgacataatcttataaattagaaaaatctgaggactccaccaaaaaattcttagatctaatgaatacattgagtaaacttgcaggattcaaaatcaatatacaaaataagtagcatttctacacataaacgataaactagttgaaaaaaatcaagaaggcaattctatttgtaatagctacaaaaaaggaaaacctaagaataaatttaaccaaggaggtaaaagatcactacaaagaaagctacaaaacaccgatgaaagaaattgaagaagacacacagatggaaggccttcctatgtttatggattggaaaaactaatattgttaaaatgaccatactacccaagtaaatatacagattcaaagcaatctctatcaaaataccattgtcatttttcagagaaataaataaaaccatcctaaagattgtgtgggactaagaaagatctgaaatggccaaagccgtcctgagcaaaaagaacaaaactggaagcaccacactacccgacttcaaaatatattacaaggatatagtaactgaagaacctggtattggtatgaaaacagaacatagaacaatgaaatggaatagagaacctagaaataaatccacgtatttacagccaactagtcttcaacaaaagtaccaagaacatgaatcgaagaaaggacaccctgttaaatatatcatgcagggaaaactggatccatatacagaagaatgaaactagactcctatttctcagtgtatatgtaaataaactcaaaatggattaaagacttaaatataaaactgaaagctctaaacctacaagaaaaaaatgtagggaaagtacttcagggcattgttctaggcaaagattttatggccaaggacttaaaagcacatgtaaaaagaagcatccaaataagaccatattgaaataaaaagcttctgcacagtaaacaaaacaatcaacaaaatgaagagataacacacagaatcagagaaaatatttgcaaactgtttgtctaacaaggaactgataatccagaatatacaaggaactcaaacaactcaatagtagaaaacaaacaatcccatttaaaggtgggcaaaggacatttcacaaaagaagacacacaaatggccaatagttatgaaaattgctcaacatcacaaattatcaaagaaatgcaaatcaaaaccaaaatgagatatcatcttaccccagttaaaatggtcattattggctgggagcagtggctcattcctgtaatcccagcactttggaaggccaaagcgtgtggatcacttgaggtcaggagttcaagacaagcctgaccaacatggtgaaaccccatctttactaaaaaaattaaaaataaaaaaaaataaaaataaaaaattagccaggtgaggtggcgagcgcctgaaatcccagctactcaggaggctgaggcgggagaatcacttgaacccaggaggcagtgctctccagcctgggtggcagagcaacatctcaaaaaaagaatggtcattattaaaaagacaaaaaaaaaacatgctcgcaaggttatggagaaaatgggactcacgcacttttcatgggaatgtaaatttgtacagccactcttgcaaacagtacggagatttctcaaaaaaaaaaaaaagtaaaaatgcaactaccacatgatctggcaattccactactggatattattcaaataaaataaaaccagttcatcaaagggatacctgcacccccatgtttattgcaatactatttacaataacagatatggaatcaacctaagtgtccatcagtggatgaatggattgttttaaatgtgctatatattcacaatggcatagtatttagccattaaaaagaatgaaattgtatcatttgcaggaacagtgatgaaattggaggtcactatgttaagtgaaataagtcagatacagaaagacaaatatgttctcatgcatatgtgagacctaaaaaagctaatctcatgtaggtagagagtagaatgatagaacagataccagagctggaaaggaggagtggtggggggaacaaatatacaggtattgggttcaaacataaagttagagagaagaaataaattctaacgtttaatagcaaagtaaggtgactatagttaacaacaatgcattatatattttaaactttcatttctgagaagattggattagtagccaacttgcctgattcagttgtagtattctgttgaatttaatcacaggacataaaaatggtaataggatctccaggaaatctccagcatttcagacttagtcctccttgcctctattatgtaatagtgacccaagtttcccttgacagtcataattaatcactcacccataaagtaaacctcttgattcactggcatgaggaaggcaggtggccaatttggcaatgttaactccctgtttaatgaaaccattgctatgtcccctattagaagtatttcttccttgggaacaagactaatataacccacagttacgcagatagaaaacaaatgtttccactagaggaacactagacatagcagtaaaaaaaaaaattactcaatttttagttcttgatccctggaaccattacacctggctttgagagaaaaaacaaagacatcccagtaaaagcattctagaaaaaacaaagacaccctgaaaaacattaccttagcctcatgaactattgccaccaaactggtgccataactcaattatcaaaaatttagttcaatattcaatggggtaacatggtgaagttaattggttggataagcataagcccattgccacattgctgtaaaatgaatgtctgtttcagtgtaaacaaagaattgcctcttctttgacggaagagggcctatgtaatcaacctaatgtcagatggctcactgatcttccaagattagtgccatattagagattcagttttgctctttgctgctggaaggacagagactcagaatggctgccaccatattgactgtggtaagtgaaagtccatgttgcagtttccatgtatcaacaccattgttattctgtttatggccttggaaaatcacatgggacagatatgcatagaatgagtcattgagtcccctgagtgtccccagtaagcaatcatatggaatacaatattttcatacctcatattccacacccaaaacttttcctcagacctccttgtcaccagttttccaatcacatttcttagaagtctctaaccatctttcctcctagaaaaaatgaatgatgttgtactacttaatgttctgcctcagaaagtttacttacactgctgttccccaaggcaacaccagaatggggctgtaatagttagtaaaactatatactttatgaacacccaacttcagtatataagggctccttcagtaattgatttatcctctttgtgcttaagtttcctcatctgaaaaaaaatagaattaaaacagtatttacatctgtaacatttttgtgagagatcaataatatcatgtgtgtaaataagactgcctggcacttgataaaggctcaataagtgctaactgtcatcattaaatggtcatcatcataattttgttattttattaaaatttagttttaacctatgattatttaactttttattcatgtatttctgtttttttatgattgtaaactcttaattataaagatcatattttatacttttagaatattaagaataccaagcacaaaatcctatgattactgactgatatgtgttgtatttaatacacttggctcaatgtactagaaatattagaagaatatttagagagagagaaataaaatgatatttgtattaatatatattacactaaacatattatcccataggtactactgttttattcatggcaatatccttagagtccagggcaaggattggtccaaactaaggactaaataaatatcagtggaataaatgatgatatgtagcgttttgcaagatttgaggcaaaattggaaagtaacaccatgaatagttgaatctttcattttgggctacagatccttgccttgttccttccaggataccaggtagcaatgttagggagttggggaaataggtagaaatccctctgccaacttacagccttttcagagacacagatacataaacacatacatattcattcatacatgtaagagcatacatgtgtaatcacacacaaatgtgtaagtaacatagatgaaagattgtaatgtaacatttcattatggcaatttataacaaatgagtggtgtgtaatgtagtattttattgagagaggaaagattcctgagcctgaagatttaagagtaagaattaaggaagtactatttgaaccagtacttgaaggaatgtgaagccaagaagaggcagagagttcttagaggcaagaagacagataagcaaaataattggaagtggaaattgtcatagcttcaaagaatgtgttagttaaagaagagcttttgcactgaaggatagtcaagattcatggttagatctatcattgcctttcacatttaaatacactcactgcaacattagtgagaagcacccaaaggccatccagcacctgtctgctgcactcagtgtggtcttctcactgcttctcagctatatgtctgtattcagatgtcatacgcatccaaagagtcaaatatacacagtcatatacaccatcagcacaacacattgggatgacacatattgtgtctactcaggcagccaaatcaatttggatcccagactgtagacaatatacagagccagcaaacatccctcccagaataaaacagtaaattttcaagactggaatgcaataaaggactatgttattaatccataggattttcatgaaaaataaatgttatttattatagtaactctaagctctatcttttatattttactaattcttcaatttgaactcatttcaaaacaatggggggaagagataaaaaatttgtttatcctgtcttatcttctttctaaatatgtgctgccaatttaattcccattttgagttcttttgtgagtaccacgaagagtgaggagaatttctctctaatacagtgttctgtacactgtgtcctgcctttgacgtagaacgtttcataatggtgatctattatgacatcaataattgtctgaaatttcagtctacaaagcctgaaactatgaaagtataattagattgcctagggacatcacaaaatcaaatgaaagctggtttgaacctagctgtctatttaacgtttggccagcaaacaaccaacatggaaatgaaatacagagatatacataaaatagatgagactgcactatcaaatctcctgaactagctctgggttctcaagtagtgggtatctgctgtgtaatttgcccaaattctactgctttccctcagaaacagctttataagtgtgtcatttatttcagatgttggctgatttccaaatgaaaatggtcaatatttagctaatgagtttaaactgaagtgaaagtgagttggggtaatcttatttggtttggttatgattgagaacacatgcagaacacaaattcttgaattaaaaaaatactttgaaactgatagctttaaatatcactaggatatatatttcagtacagctaggccctgtttatacagtagatataattatcagatcctgcttttagaatgttggccactgccaccatccctgaagacttgtatccttttaaaagtacttaggatggttgaaccaaagaatatcagatctggaaaaatgaagttagtgtttatttaggcctcattttagagaggggcaaattgtcaccctaagaagtttagcattgcactatgtaacaaaagtcctaagaagagaaggtggaacaaaattccttgggaattctaggatagtgattattttggcagaacacaggttcctaaaataaggaggcagctgctttgagatgaggcttcttggtgggagtcattgggatttgggtggtttgccaatgccagaccaatgacaaaagtgagggtttaatttttatagaaaattgcttttcttattctagtgaccttccttttttccctaaatattgtgaccaatatgactgcaaggtatccagtggaagtactttccagttttctggatgggaataaagtcaagggcacatacccccatgcaagtgaagttgatatatgtttgacagctcatgatagatttcaaggaaataaatttctcctgcattctaatctaaattgtatcttttgcattgtcaacgtttttccctgccaagccctcttttcagaaatgcttttacagagtagaagtgactaactagaatgtcatcttgttttcttcaccctctcttttccttgctttgttatttggtccacaaatctagccttaaaaccactgaaatggtttcagtcatttgtcttgtaaactgtgctactctgaggaatcgtttacaaaattccttgcacatatttgtaagtttatttctaagttactcttaaaaatagatcaaaagttaagattgtttaaaatcttaactacagtcaaaacttctgtaaatgttttacctgtttatatttcactaacaatacataagagttagtacctgttaacctccccacatttgcatatccatacaaacacagtatattttctctcattatcagtgtttgacttattttcctatatttaatggtactggatgccttttcacattctctgttcatttttctaaacgtccttcatcaaatactagttaaatacattctgtgtaaacgttcaataaaataatgggcagtcattaataaaaggtgggaaattctgtatgacctaatatgggaaacccccaatatatagctaacattagttttctcagcaatgtgtatacatccatgcttgtatgagcggaaagtatctctgaaatgatctacatgaaactggaaagcatgcacgcttctgggatgacacacggtggattcagaggcagggctaggaggaaaacttgcttttcacaatatcatgtgttaacttttgatttcttttgattttaccatatatattattaccaatttaaataaaaaacagtaatatccacaaaattgaaaaaatggcttataaaatggaaatagtgaggagcaaagtagggtgaaatcaaagagctgttagtgactctttctccaagcacctagtgatggctgaaaacagattgtcggttgtgactgtcagtgaacagccagagggcgatgtgatcagggcctgctgtgttggcatccttatcctatggtgactggtaattccagtcacccttggtcaactcccatcctcccttgcagaaaccctgaggcacacaagtagcacaaagttttccaaaggcctacctagtcgtgaatctttctcagagaagcaaaacaaaacaacaagtaagtcaaatccaaatcatgtgcaataaattttgtttctgtacttgtctaaaaatcatgtaacactctgtgatatattttcttataagatgaacaccataattaaagtatgaattatttgtttatgtttctaataataacagaaataaattaaaagtacaaggaatttcaagcaaacataaaaggtgaaatcacctataatcccagcttacacagatatcaaatattaatattttcatatctcatacatatgcatatgtacattatatgctttatatgctccatgtgttttaaatgtttacatgtataagtactttaatgtttgtatacttatttatttttttcttttttctttttatttatttatttatttttggagacagagtcttcctctatcccccaggctggagtgcagtgacacaatctcggctcactgcaacctccacctcaggggttcaagcaattctcatgcctcagcctcccaagcagctgggattacaggcgcctgccaccatgcccggctaatttgtgtatttttagtagggagagggtttcaccatgttggccaggctggtctcgaactccttacttcaggtgatacaccctccacggcctcccaaagtgctgggattacaggcatgagccactgcgcccggcctcatttatttttacatacttgagataatgctttttaaaaaacatatttacaaatagatacagccagttatcacaggaaatgcttttaaaagtaaaatttatgttgagtgtcaggcctctgagcccaagctaagccatcatatcccctgtgacctgcacgtacacatccagatggctggttcctgccttaactgatgacattccaccaccaaagaaatgaaaatggcctgttcctgccttaactgatggcattatcttgtgaaattccttctcctggctcatcctggctcaaaatctcccctactgagcaccttgtgacccccactccagcctgccagagaacaatccccctttttcctttacctacccaaatcctataaaagggccccaccccatctcccttccttgactctcttttcggactcagcccacctgcacccaggtgaaataaacagctttattgctcacacaaagcctgcttggaggtctcttcacacggacgcgcatgaaatttggtgccgtgactcggatcaggtgaactcccctgggagatcaatcccctgtcctcctgctctttgctccatgagaaagatccacctacgacctctggtcctcagaccagccagcccaaggaacatctcaccaattttaaatccggtaagcggcctgtttttaccctcttctccaatctctctcactatccctcaacctctttctcctttcaatcttggtgccacacttcaatctctcccttctcttaatgtcaactcctttcattttctggtagagacaaatgagacacattttatccatggacccaaaactctggcaccggtcacagactcaggaaggcagacttcccttggtgtttaatcattgcagggacacctctctgattattcacccacatttcagaggtgtcagaccacgcagggacgcctgccttggtccttcacccttagcggcaagtcccgcttttctgggagaggggcaggaaccccaacctcttatctctgcaccccgatcccatatttccatgccccgacctcttatctctgcaccctgatcccttatttctgagccctgacctcttatctctgtgccccaaccccttatttctgcaccctgaccccttctctgcttttctggagggcaagaaccccccaccccttctccgtgtctctactcccttttctctggacttgcctccttcactatgggcaagcttccacctcccattcctccttcttctcccttagcctgtgtttttaagaacttaaaacctcttcaaatctcacctgacctaaaatctaagcatcttattttcttctgcaatgccacttgatcccaatacaaactcgacagtagttccaaatatctggaaaatggcattttcaatttttccatcctacaagatctaaataatacttgaatcggcaaaggctctgagatgcctgatgtccaggcattcttttacacatcagtccctccctagtctctgttcccaatgcaactcatcccaaatcttccttctttccctcccacctgtcccctcagtcccaaccccaagtttcgctgagtctttctaatcatccttttctacagacccatctgacctctcccctcctcaccaggctgagctaggtcccaattcttcctcagcctctgctcctccaccctataatccttttatcacctcccctcctcacacccttgtctggcttacagttttgttcagtgactagccctttcccacctgcccagcaatttactcttaaaaaggtggctggagctaaaggcatagtcaaggttaatgctcctttttttttatcccaaatcagatagcgtttagtctctttttcatcaaatataaaaatccagcccagttcatggctcatttggcagcaaccctgagatgctttacagccctagactctaaaaggtcaagaggccgtcttattctcaatacacattttattaaccaatctgctactgacattaaataaaactccaaaaattgaattccagacctcaaaccccacaagaggacttaactaaccccaccttcaaggtgtacaataatagagtagaggcaaccaagtagcaacatatttctgagttgcaattccttgcctccactgtgagacaaaccccagccacatctccagcacacaagaacttccaaacgcctaaaccgcagtggccaggcattgctccagaacctcctcccccaggagcttgctacaagtgccagaaatctggccaccaggccaaggaatgcccgcagcctgggattcctcctaagccatgtcccatctgtgcgggaccccactggaaattggactgttcaactcacctggtagccactcccagggcccctggaactctggcccaaggctctctgactgactccttcccagatcttctcagcttagcggctgaacactgacactgcccgatcgcctcagaagccctgtagaccatcacggacgccgagctttaggtaactctcacagtggagggtaagtccgtcccttcttaaccaatacagaggctacccactccacattaccttcttttctagggcctgtttcccttgcctccataactgttgtgggtattgacagccaggtttctcaacctcttaaaactccccaactctggtgccaacttagacaatactcttttaagcactccttttaattatccccacctgcccagttcctttattaggccgagacacttcaactaaattatctgcttccctgactatttctggactacagctacacctcattgctgcccttcttcccaatccaaagcctccttttcgtcctcctcttgtatcccccgaccttaacccacaagtaaaagatatctctactccctcctgggcaaccgatcatgtacacctcaccgtctcattaaaaccttatcacccttaccctgctcaatgccaatatcccatcccacagcacgctttgaaaggattaaagcctgttatcactcgcctgctacagcatggccttttaaagcctataaactctccttacaattcccacattttacctgtcctaaaaccagacaagccttacaagttagttcaggatctatgccttatcaacccaattgttttgcctatccaccccatggtgccaaacccatatactctcctatcctcaatacctccctccacaatccattattctgttctggatctcaaacatgctttctttactattcctttgcacccttcatcccagcctctctttgctttcacctggactgaccctgacattcatcaagctcagcaaattacctaggctgtactgcagcaaagcttcacagacagcccccattacttcagtcaagcccaaatttcttcctcatatattacctatctcagcataattctcatgaaaacacatgtcctctctctcctgatcgtgtctggctaatctcccaaaccccaatcccttgtacaaaacaacaactcctttccttcctaggcatggttggatacttttgcctttggatacctggttttgccatcctaacaaaaccattatataaactcacaaaaggaaacctagctgaccccacagttcctaaatcctttccccactcctctttccattccttgaagacagctttagagactgcccccaccctagctctccctgactcatcccaacccttttcattacacacagccgaagtgcagggctgtgtagtcagaattcttacacaaggaccgggatcgcatcctgtagtctttttgtccaaacaacttgaccttactgttttaggctggccatcatgtctccgtgcggcggctgctgccaccccaatgcttttagaggctcttaaaatcacaaactatgctcaactctctacagctctcataatttccaaaatccattttcttcctcacacctgacacatatactttctgctccccggctccttcagctgtactcactctttgttgagtctcccacaattaccattgttcctggtgcggacttcaatccggcctcccacattattcctgataccacacctgaccctcatgactgcatctctctgatccacctgacattcaccccatttccccacatttccttcttccctgtttctcaccctgatcacacttggtttattgatggcagttccaccaggcctaatcaccacacaccagcaaaggcaggctatgctatagtagaagccactagcctgcttcttataacctctcatttcctttccatcatggaactctatcctcaaggaaataacttctcagtgttccatctgctattctactactcctcagggattattcaggccccctcccttccctacacatcaagctcagggatttgcccccacccaggactggcaaattagctttactcaacatgccccgagtcaggaaactaaaatacctcttggtctaggtagacactttcactggacggctagaggcctttcccacagggtctgagaagggcaccacagtcatttcttcccttctgtcagacacaattactcagtttggccttcccacctctatacaatccgatagcacaccggcctttattagtcaatccagccaagcagtttttcaggctcttggtatacagtgaaacctttatatcccttacagtcctcagtcttcaggaaaggtagaacggactaatggtcttttaaaaacacacctcaccaagctcagccaccaacttaaaaaggactggacaatatttttacctctttcttttctcagaatttaggcctgtcctcagaatgctacagggtacagcctatttgagctcctgtatggacgcttcctttttattaagacccagtctcattccagacaccagaccaacttggactctgccccaaaaaacttgtcatccctactatcttctgtctagtcatgctcctattcacagttctcaactactcatacatgccctgctcttgtttacactgccggtttacactgtttctccaagccatcacagctgatattggtgctatcgccaaactgccacttttaactcttgaagtcaataaataatctttgctggcaggactatgctgaatccccttaggcactctctaattagatgtcctgggtcttcccaattcttaggcctttaatacctgtttttctccttctcttattccgtttagtttttcaattcatacaaaaccgtatccagaccatcaccaataattctacatgacaaatgtttcttctaacaaccccacaatatcaccccttaccacaaaatcttccttcagcttcatctctcccactctaggttcccacacctcccctaatcccgctcgaagcaaccctgagaaacatcgcccattatctctccataccatcacccaaaattttcactatcccaacactttaccattattttgttttatttttcttattaacataagaagacaggaatgttaggcctctgagcccaagctaagccatcatatcccctgtgacctgcacgtacacatccagatggctggttcctgccttaactgatgacattccaccacaaaagaagtgaaaatggcctgttcctgccttaactgatggcattatcttgtgaaattccttttcctcgctcatcctggctcaaaagctcctctactgagcaccttgtgaccccccactcctgcctgccagagaacaacctccctttttcctttacctaaccaaatcctataaaagggccccacccctatctcccttcgctgactctctttttggtctcagcccacctgcacccaggtgaaataaacagctttattgctcacacaaagcctgtttgatggtctcttcatacagacgcgagtgaaattgaggtcgaaagaatttagggttattctattatgtgtaagtatgactgttgaggctgttttctcatttgtatggcgtttggcaaggtttgatattaggtttaatgctagttttagaaaagcaatttggaaacctgtgtgtgtgtacacacaaacagcatatacatatattcttccatagttattgttctatttagtttttattcttttctggcttcattttaataatgtgtatttttccataacacatccccttcaaaaaattttctaatgtatacatttatcttctctagtttttaatacatgtcctctcgttttccaaaatttggaagtgggggtggtggaactgcttttgtcctttttttattgactacaactgtgtatttaactgacttaaaacaaaatcaactcttgaatttgcttatttacaaataactatttagttctataattctactctttgacattttgtggatatttttattatctttattactcactttctcctaaatattaatagtttaaattcatgagttgaatgtttatttattttctttcttttatgtctaagtaataaaggcttttagggctagattgcattattgatcaatattgaacattatttcataaagcaagataagttgtatagatgtctaaaacctataaaatattttgcaatttgaatattatgctcaaagacacgtaaaatgtattagacatgtaattacagaaaaatctctaaagtactaaaaacatatagagaatattaaaaatgacattaatttataagaaatttgacccatataaaattaatatatgaatgataaataaaaagctaataaattttcaaaaaaaattaccttctaagactttagaaaaacatttgaaaataaactttactgtgtcttttaaaatatccatgaataatggatttgagcttgaagttcagatcacttctccaacaaaaaaaaccttcaatgaatctgaatattaaaatagctcattaagaaacttttcccctaacaatttagagagttctcaaaataatctcttattctcattttcctattatttaacttatgtttattgcctctcctctacatttaatgatttgagaactgtgattaaatagatacattattaaagctttcctttgttgaaatatagctctgtatattttcaaatgctattggctatcaactatatatttatcatgtaaacctgatatcaacagcagcatgctccttatttatttggagatttcaacaaagtccacttagattttttaatgaccaaataaataaaagtgtctagagagtcatcggattttatttggtaataacaaataatcagattaatatcaacaatatcaaatgtcaatccccgcatttgagtccttgaagaaacttagttttttctttatgtccagccattgtcaacatttcgaaggaataattttctcttccgaatagaaaatagacagtaagcaaaatttaaataaaatgagagaacttctgataaaaatacatagattatgttttaaaggaagaatttatcttttctaccttttttcttttccctcttttaaacaagaattatgtccaactatgatagactggattaagaaaatgtggcatatatacagcatggaatactatgcagccataaaaatgatgagttcatgtcctttgtagggacatggatgaaactggaaatcatcattctcagtgaactatcacaaagacaaaaaaccaaacaccgcatgttctcactcataggtgggaattgaacaatgagaacacatggacacaggaaggggaacatcacactctggggactgttgtggggtggggggaggggggatagcattaggagatatacctaatgctaaatgacgagttaatgggtgcagcacaccagcatagcacatgtatacatatgtaactaacctgcacattgtgcacatgtaccctaaaacttaaagtataataataataaaataaaaaaacacaagaattgattctttttaattgacagcaaaaatttaaaaaaacaacttattgtcatcaaggattcactattacattttataatatggctggaattatgaaatgtgtgctggtataattaatatcagatagataaaaataatattctttatctttgttctgttactaatcctcagaaattaacaataagatctctttgaaaagtgtgtacattaattctcttgacctgggcaccattgcaagaatgcatataatagacaagcaataattaaatgtcaaagaagttgctgcaatttttattcagaagaatttaaaaagcacatataaattttaaatgtgaaacaagaatgttatttaaatcaggagggagtgtcgtttcttcctaatgcccttgtcaaacaactactctaaaatagcattacatgtaattctgaaatgccatggattaataagagacattcaaattctataatgcaattcagtttttacctccggtcatgattttcttttccatggccttcagttttgtccttagactcatatatgtgtaaattgacaaattttcttttgtaatataaatttaaaagaagagataaaaatgcaccatacaattaagaagaggggaagaattatttattcacatacagttatctgtgtgcacttagtcaattcacaatcaatttgaattgttattttttaaccgaacttggaaagtttgggatctacaaagtagaaattgaattctagccaagaatttactacatagcaggtataaaatatggtgagtatcaacagttgaatgcttgtacccttcccccaaattcatgggttgaagccctaagccccagtgtggctgtatttgaaaacggagcctttgagaaggtggttaagagtaaatgaggctgtacaggtggagccctaatccaataggattaatattatcagaagagacaccagagagtttgcgtttccctttcccgtaacacatggagtgaagaaggccaaagtcaagagcaaccatctacaagccaggaagaaagtcctcaccagaaactgaattgttcataaccttgatcttggacttttagcctccagaattgtgagaaaaactactgttatttaagccacccagtctacagtattgtgttatggcagcctgagcagactaaaacagtcagatagaaactaagtgattgttcagtgtagcactgattacattataacattggcataaatatcctaactgcagctatgagaggtttgatagatagtgaaacaaattcaagaagtttttctagtttttcagcaaaattttaaaactacaaaaaggaattaatattttaaactctagatcaattaacagtcttcattttgtttaaaaacaatgttttgaatagattttaaaggaccaattttacagcaacatctaaactcaattttcataatttccagtattgcctgaataagattagattctttattaatcacagccataaaggaaattcaactttaaatgggatctttgacatctttctttccctaatcttctttagtgaatttccttgcagaaaaaaataaaagctaaatggttaaccagattttaaggttctcatctcaaagttttcaaacttgtaactccccaaatatgtatgcccaacactaactcctgccctcaaccgaggccatcttgcatccctagcctccatcagcttattatttccttcatcaaaaacacagcctccctccctgattccaggctgtcactgtccatcatggtttacccactcttgagactcaccttaagcaacatcatcaggacacatttctatttcctctcgatcggaatcaaccactgccttggagctctatagattttttaaaaatttctataatagtagcatttatcccacgctattttgttttatactgttttacatcattgcctttcccctctaatagagtgtgatctctaaaacaggaaagacagcagctagtatctttttgcattttccaaaaaaactaacccagtacctattggcataatcagtgctaaatttttgttctgaatcaataaatctgtaatgacttgggaaagtaaagttatgttattgatgttcagttgttggtattcttcaagaatcacaaaaataatgagtcttgaattttagtaatttattttttatagcaggcattggcaaactatggcccatgggtcaaatctgggcatatttctatttttgtatagccttcaagctaaagaataatttttacactttccagtgtttataaaaatcaaaagcagaataatattctgtgactcatggcaattacataaaattaaaattttatgtttgtaaataaagttttactggaatgtaactgtgccattaacttgggtattatctatgggtgcttttgtgctacaacagcaggattcagtagttatgacagattgtatagctcacaaagcctgaaatctttactatttgacctcttacagtaaaagaacttaataacaccttttaagaatatttgatttgcagtgtttattgtatcgattttgcacttttgttttgccttaataaaacatttcattatttgacaatatattgtgatgttatatttgaaagaattttaaaaagcaatggtggtaatataaaaaagtttggtgatccaacaagtaccagaagaattattttcaaaaagttatgccatgaaagactgaattatccaggcatgtcaatgttataacattttatcatgttattatataaaataagttctggttaggtagaaagccaatatcagtaaatgatcactaagtgcctatatgtacaagatgaagaaaagaggacaatggaagaaaggggacagaaacaagagaaatcaagaaagcaagataacaacatcaggaaattaagtgaagaacaatgagagtaagttgtttggccagggtgagaagactatttgtggtgtctttaacagatatagagttcacagcaattaaaaatatgtggaggagcttgatatagtaaattctgaaagtaccatgtttgggagacttgtgtgatgtccaggaagagatgttcaacagacaactagaaatacaatactcaagctcaggatacacctttgagtgtgatcttcttacaaataatagttgaagatatgagcatataaaaacagcaaagagccaaggacagaagttaggcagaacatgtataacattggcttggagtaagagtcaaggacagaagttaggtagaacatgtataacattggcttggagtaagagtcaaggacagaagttaggtagaacatgtataacactggcttggagtaagatcctaggacagaagttaggcataacattgtataacatgtataacattggcttggagtaagagtttatagaaaaaaaaattaagtaggtagtaggatcagtagaaaagagcatgataaaatgagattttcaagaatacagaggtaatcgatgtaatattgctgacaacagaaaggctaagaaaataaaatacatagaaatgtcactggatttagaaaggagcatatcattgggagtaccacctttagatacagagaagggggcatcttataccactaaagagcccttgaaaccacaaacatactcacacactacattgttataaaagaagatatgggcatatccttctctcaggattcggccctcagctctaaaaagcccccaaatattgtctttaataagcccaggaaacatttctcattaaggcactatgtgctaaatatgtcccccaaaattcatatgttaaaaatgtattccccaatgcaacagtgtcaggagatgaggcctaaaaggaagtgtttaggtcataagggttctggcctcatgaatagtttaatgccactataaataagatttgcataaattagttaggtgtggtggtgcatacctgtagtcccagctacttaggagggtgcggtgggaggatcacttgagctaggtagattgaggctgcagtgagccatgatcatgcctttgcaatccagcctggtgacagagtgagaccctgtctcaaaaaaaaaaaaaaaaaaaaaaaagaaagaaaaaagaaaaaaaagaactttcaggagtggggcatgggttctctctcttctgtttttctccatgtgaggacatggtatttaaccacccttgcccttccactttacaccatgggaggatggagcaagaagacccacaccagatgccagccccttgctcttgaatttccccacctccatcactgtgagaaataaatttctgttttttataaattacccagtctcagatgcagcagcagaaaacagactgagacagtgctctaaacataggcaattgaatttcagtgttgtcaagatctctggtttgtgctactagcaaagacagggatgggatgctaggaggatttgaataatggcattgcatagaaaaaaattgacaatttaattaatttttcaattttttttcctcagataatgcatattcagtaaactcttgcattacaaaatgtgttttcccagcaatgccaaataaccattttcttctttttctttgtcttccatattggtgtgaggtacttagaaattaatgctgtatttgcagcaattgtaatacttactggggaaaatatttgactatactttgcaatttatattgctctaaaatttgtatataactaactaggtatagaattaatatgcttggacagtagcacttttttttttaaacattttcacctaaattctatttgaatgctagaatatctaatactagaatggctaataataatacacctttccaaattcttttagtaaaaatttatatataatttaatttgccaaaagatgaaaacaaaattatttagctttatttaaacattttatcattaaaatgttcatacttattaactataaattttcctttacattttaatagatatactattttagaagaaaaatatattttaacatatataaaaataattttttttatatttacatgtgtttataatatttttaataaaaatatgttaagtttcatccaggtgtagtggcacaggcctatagtcccagttacttggatgcttgaagtgggagcaccacttgagcccaggggttcaaggttcaagttagcaagaccctgtctctatgtttaaaaaaaagttaaatttaataaattttgtatatgattacatttaatttttaaactctttaataatgataatgaatacaagttgctttcttaatataaatataaaaaataagcagagctttcaaacattttaaaaatctgaaaagataaaatagaaaatcttcaaagaggatgattgcctaaatgtttaaaaagaaaagataattaaaggaagaagacttctgtagagcatgatttatacaaaaaaagaacattatatatatatacatataaacagaacattatgaagcttttttatatttaaaagttataatttctgatcaaagcaatgagatgaatcatacaatttttcttatcaggtccaaaactgaaacaggttaaatgaattcctattatttctaacacttcaacaaagatagattactgatcaaaacaataaaattgagaaaaaaaattatatcagatttgcaacaaatgcaactctggcctgctgtttagaagataagttaaattcatgaaaacaagaaattgagaaaagaaaaacaacacctcaatttttctatgtttacgagatcacaattctggaaaatggctatggcattcctctcacggtatgaaatgattgtagctacacacaacctgactcaaaagtttgaaattttctattgaaatgaacatggttgaaaatttagtatttaactatacaccaaaattaattcccataaagaaaaaaaagtacagaggttacagtttgggttattgttacatatttcacaatcaatttttgaaatcacctctgtaaaaagctgttactggaaacattttgatttcgaattaaaacaatataaaacttcccttacacaggaaaaaaaaacacatttaattactgctctgaaagaaaggaactgaatagatagcaaatgaacaatagtattaaataaatataaataaatcctaatacaaaatgtgatgttcttaaagaatacattatgtggcaaataattagccaatcataatagtgctttacaagatacaaacaacacagtaattacagaaaataacacaaattttctggtttagtagaaatcattttgaaattgagaccaaaatagccaaaatataagatatattaaaaataacaaaatattatcactactcagaatggataaatcaaaatcaaattattaatagatagtaaagtgagagaagaaatgttatacaaaaattataagtaaatactatttattagttcaactagattgtacaggagaagaaatccgagcagaaaatgacattaactgtggataattcaattatcagaggaagaaaacaaggatgttaaaattaatatttcactgtttttatacctggtgtttttaaaaaatgcatggttttgacgtcagtgaaggactgaaaaaaacaaatattgtttttaagccttttccaaggcttaaaatcttaaaatctttctgtccagaaagattatgaaggacaacactatgataatgttattagaatgattgattaagaaggaagattacaaagtagaattttggctgatctttctgagacattcttcatgtcatgtgcagcccataatttgaatttgttatcaagaggcctcaactggacccaaagaagtgataaaataatttgtaagaattcaaatactatatatgatggttttttggatctgtctaaagatgtaatatcttgaaaaaagatactaagtttaaaaattttttgaggcatgatgaaaatgctaagtgatgttaagatatacaaaattttaaaaatgcactttaaaagataagcaaaacactttggaaggccgagtcaggcggatcacttgagatcaggagttcaagaccagcctgggtaacatgatgacattccgtctctactaaaaatacaaaaatcagctgggtgcggtggtgcacgcctgtaatcccagctactcaggaagctgaggcaggaggatcgcttgaactcgggtgggggcaggttgcagtgagccaagattgtgatattgcactccagactggctaacagagtgacactgtctcaaaaaaaaaaaaaaaaaaaagcaagagtagaagctctagccaggtatggtggtgcatgtctgtagtcccagctacttgggaagctgaggtggaaggccagcctgggcaacagggcaagactccatctctgaatgaatgaatgaatgaatgaacaaataaccagagactcagactgaagtaaattttggttttgggtaggaaatataataactttcaatttgtatcattcaaaattatttgatttgaactgttgaaagctagtattttaaccagttacaaaaacaaataaatgcaagtttgtgaattttactttttacaaaagattgaagtttacagttttaaaattttagagagaatgttctttaatatcaaaagaaaatgcctttgaaatatgtaacaaaatggcattccaatataatatgagacagaataggaaaatgagaatttttgcatgactgtgaaggagacaatacacacataaataatctcaaaaccaagattaatagaaattacgttctggccattacagatctaggtatagtctcgattttactattttctgtgttctttataatatcccagaattaaaatttttaaagaaagaatttaataaacattttatgaatctagatattacttttagataatgaggagcattacatacatgacataaatttatgcgattaaaatatgtttagtattttctgaaatgacattaccagttgtgacctcattacaatatttgatcatagtatgcaaaatttatggcttattttaaaatctgagcttgaaaaacttaacaatcctattttccactgacttgcagaataaagtataagtcaaattcaaataagaacaatgagaaaaaattgaatattttggcattattgttaatagtgcacaaattatttgaaaattttaattataaaagtataactagttaattttctttaaaaagataagaaaaataaatgtgatgaaataagtatgtagtttatgatttatgaatatcatcatttcattcttacccaaacatcactgcccatcaccagaaaaccagacatgtacaataaagaagtttgcacatctttggtattttgccaagttgcagatatgaaacatcacaggtgtacatgctgctatgaaagtattttgtcaaaagaataaaatatatttgttacctcaatgcacattctttttaataattagacatatagcatgtgggcctccatttattataatatccagggctctaaaaatattagtggcaggactgatattgttttctattaaaaaaagatacttatattccaaattgaagaccaagtcagattgcaaaattttacatttgtgttgtagagttaagatcagaagatgaatagatgaatcttgcctattaaggccagatgatcagatgacttacgtaaaagcaatgcaatgctttttttttctttccttcttttttttttttttgttttttgttctttaagtatgttaggatcccaatagaaaatacattcaaattagggtaattcaacaagagtttaacaaaaaaaaaaaacccaacaacacttataaaagtacgggtataaaaacatgacaagaacacactaagtattggcagagatcttaacacctctgggccctaagagctgccttgagtgaaagaagtttttttagagacagtcagcccaaaggaaccccacagggatgaagccaggggaaaaaaacaatcaatcaaactcctacacttcttccttatattttctgtgtggatctcattggatgaaaccaaccataagccagagaacaagagaacaaattgatgaaatccatacaactcattgatgaaacctacatagatcagcctctcaagacacagatcatggtggagaggaatgatgaacagatctgatgggaaagcagaaattacctggaacagcatatttttctccttttagaatccactcatccttcattcacttagaaaggttttattctccacacatggggcatacaaataccgtaaggtactgtatcattgtagtgatgttaatttgcttgtactttccactggatactgaaatattttctgtcactaatgttcttcataaaaaattgaaggaggggcatagaaatgtaatcagtgttttttttttttttaaaaaaaattgagtaataccatttacttctccagtaaatagctacaagctcaggcctgtaatcccagcacttttgggggccaaggagggtggatcacaaggtcaggagttcgagaccagcctggccaacatggtaaaaccccgtctctactaaaaatacaaaaattagccaggcctggtggcagtcacctgtaatcccagctatttgggaggctgaggcaggagaatcgcttcaacccaggaggtggaggttacagtgagcgaagattgtgccattgccctccagcctgggcaacaagaacaaaactccatctcaaaaaaaaaaaaagctacaaaagtttgcttccacagctggttaaaaacctaacttagtaagcatagttgtttcgtttacaatgtattcaacttacactccaccagcaccccagctctcacaacacctgacacctactgtcacagatcctgtacccttagaaatgtggtatttgtgtgcaaaaagtttatttggacatgctcaagataaacagctatgaagtatggacacacaactggatagtaagataatttgagtagtgatgcagccacgaccaagaaatcagttgattctatggatgaatttggagctggaatggttcagagacactctacactgtggcacagggacaggcccatatacctctctgttgaccaattattggacttggctgcccccaggaagagggcatgaccttaggtgggtagactattcaacctaaagaaagtcctggacaggaaggcagctgagaaccattggctgccaagactctcagcagtccaagaaatgaatatttcagacctggaggactgaatcttggcagtgaaccatgccacacactatagatagccactgttttcagagaccctcttgggagctgccgtccaattctagctagtgctggtataacaatcacacccagtagcaaaccaggttcgttctttttccttctccataatggcaaagcaatgaagcagataccatgttaaactgagccatccatttgtgctttttacttatgtctcccagagcagcttcagctcagtctaatatataccacttccattttataaagtaatgctgtcatgcatatccaattttatggttgggttaagcaggtaacatacaattcatcttaaacagtatgattcacatagccatggggttttacaaggccatgcattcactttctatcagagcccatttgcaagacagaagaaacttttcaaatggaaatagttgatagaatagaagggaattacattactccttaagtgtagatatctgagctgtaattgctcttatctgggtttggaagggtttcatacaaaaatcatgtctgtcacaaatgcttcaaaaatgagtggatgtgctaggttattagacccaaaaggcaatatggcatgaaccaaaaccagtctggttgcagagctttttcttattcaagactcaaatcaatgctggcacctgtccaaataagtaaatgagttggagaaggttgaccaaatacagtatatattggttccaaaatccaaagaggcctactaagttatgtgtttctttcactgtgttgggtaacataacttgactcatatttcagaaggactatcttaccaaaaatttcactgatgtggcataccacagaactttttagtcatttatctcccattttctgcaatgcacctatattactaggatatttatgtttttactttctgtttgccattttcagtgagtataatgtcttcagtacaaagcaagcttgtccaacccatgacccacaggccacatgtggcccagaacagctttgaatacggatcaacacaaattcataaactttcttaaaacatcatgattttttttgtgattttcttttttttttttagctcagcagcttttgttagtgttagtgtattttatgtatgacccaagacaattcttcttccagtgtgtcccagggaagccaaaagattagacaaccctggtataaaggattaagatgatagtcaggccacagctctgctcactccccagcaccactgaatctgaatcttcagtttaataggagtcacagataattcatatgcacgtcaaaatttgagaagcactgaccaagactatatcagataggtgagcaaatacaacacagccttgaggcaaaacaagataagtacctttttgtccctactatataaatattctcattccatagataaaagtcccattccttccccagcaatgtccttatcttagtgtgaaatacttagcaaggttaagtatttcattgatgtttacagtaaacccttgtttgtctttagtattatatcctctgtgaatctgtgagatgaaggattccttcaaaactgccaatgggccttctccacagaaatttgtagttgttcatagctcatacttttgcttttcctatgtgcacatctctaggactataaaccaaatccagggaccctccccccaaccaaaacattgtataattactattgttttcatagctaccaagtgccacagccacttgctctccctccgtgtgccatctagtaatttgatttggctaattataatgccacactatgccatggattacccatgcaccatcccctttagcaatgcgttattatccctgtgttctttgcatgtatgagtgatttctctctagaattccattttgaggatcagtttcctagggccatttaccaattactatattagtcaagaccaagcatagcaaacttaaacctcagtacagtcgcaggaagaaacacacaaacaagactcagattattttgaggattgaataaagggaaagcacaatgggataccaccttactccaggcctaattacaacaggccggttaccacctctggataaaacttgggggaaggaagtagaattgttatcagactccggaagtggagagggttataaacaagaccaccttgaaaagatgggtaatttttagttaaaggtcatagtgagccagaggcactagagagggagctggagaaaaaatatcctgaatcttcaatcctctctccctcttatccacttcagaaacttcccattggctcaacacaagaagctagtagataagaaaacccattgaagtaagtcacttggagcagagaatagaatgcaaaaaaaaaaaaaaaaaaaaatggagactagagctagagggacaaatgtaaccacccagtgcatcgcaattcaatattcacattataataagaaatatgaatgccaaaggtagaagagccttaaatattctgcagactattttctaccagaaggcaaattatcacaggaaagggaattataatcagaaatttgcttggtgaaaagagcaaaagcacaagaacgttaattagattaatttaatggttattaataagttataataacctaatgtactcatctttactatagtgacattcttcactcattttttcacgatcaatttgaatttctatataccaagccatatacttggcattggaaacacaaagaagattaaaacattgtctatgtctccaagaagctcacagctctagtgggaaagcagacacagagaatataattcactataacacatattacgtcagagataagcacaaagttcataaaatctcaaaatgagggtacttaggcagactaatggatcaaggacatttctcagcagggattatttgtgcagtgttaaggattagtaggtgttaactaagaaagaagcatgagaaacatattcaggagaaacattatctacagaaatagtagggaatgcatagaaaattgcatgtatcagcccagtatgtctgggatgtatctaaaatacacagtaggatcaaaataactatagccatgtactcagggacaaaattatgccaaggtttttacatattaacaaatttatactttacccaggagtgaataagaagctatagaaaaatgtaaaactttggaatagactgaatcctgaaaaaacagtcatctactaattagctactctccttcctagatcgtgttaaagacatcctagcaaatcctggtgcttcaggctccacttttttaggcattaagctaatgactacccttctacctataggtttgtgcttctgacagtggtcaactaacttaggtccaattttctatgttaaaatcagattccaaattttcctaagtcgcattaactaaaaatggatatccaagaactcttcagtcacatatttatgtatgatttccatacataaatatttatgtatgtcagttatttatatagtagctcatcccaagaagatttttcatgaattttattcttaggtaatggtaatatcttttgggtttagaatttaattgccgttattcttagaccttcgtgaattgttttaattgaaatataatagacatacatatcttgaaggcacatgtaataatttatacattcatatatgtgtaaagatcaaatcaacataattgggatatccattatgttaaatatttatcttttctttatgttagaaagattcaaattattcactgctagctattttgaaatgtgctattttgattattgttaactatagtcaccctattgattaatctacagaacagtagctctcatttctttcatttaactgtatatttgtacccgttaatcaacctctattcaccacccccactcctttactcaccctagagtcaggtaatcaccagtctactctctgtctttgtgagattcacttttttagctcccatatgtgagtcagaatatgtgatatttgtctttctatgtgtggcttatttcatttaacataatgacatttagttccatgcatgttgccgtaaatgtcaggaatttattcattttatggctgaataatatttctctgtgaatgtatatcacactttattcatgcattctctgttgggtagtaaagttaattccatgtcttggtgattgtgagtagtgctgcaataaacatgggagtgcagacatttctttgatacattgatcttccttttttatttttattttttttttccatgacagagtctcactctgtcgcccaaactggagtgcagtgttgtcatctggggttgctgcaacctccacttcctgggttcaagtgattcttgtgcctcagcctccagagtggtggggattacaggcacgcaccaccatgcccagctaatttttgtatttttagtagagaaagggtttttgccatgttgcccagggtggtctcgaactcctggcctcaagtgatctgccccctcagcctctcaaagtgctgggattacaggcgtgaacctctgcgtctggccagattttctttcttttggatgtacactcagcagtgggattgctggatcgtatgataaacgtatttttagttttttgaggaatttgtgtaaagttttttatactagtggcactaatttacattcccatcaacagtgtccaagagattttctttctcaacatcctcatcaccatctattattttctctttttgataaaagccattttaactgaggtaagatgatatctcattgtggttttgatttgcatttctctaatgattagtgatattgaggattttttcatataccagttggccatttgtatgtcttttttggagaaatgtcctttcaaatcctttggccatttctatttctatttttatttatttattatacttcaagttctgggatacatctgcagaacgtgcaggtttgttacataggtatacatgtgccatggtggtttgctgcacccatcaacccatcatctacattaggtatttcacttaatgctatccctccccttgcccccacccctcgacaggccctctgtgtgactttcccctccctgtttccatgtgttctcattgttcaactcccacttatgagtgagaacatgcggtgtttggttttctactcctgtgttagtttgctgagaatggtttccagcttcatccatgtccctgcaaaggacatgaactcatccttttttatggctgcatagtattccatggtgtatatatagcacattttctttatccagtctatcattgatgggcatttgggttggttcaaagtctttgctgttgtgaatagtgctgcaataaacatgcctgtgcatgtgtctttatagtagaatgatttataatcctttggatatatacccagtaatgagattgctgggtcaaatggtatttctagttctagatccttgaggaatctaattccactgtcttccacaatggttaaactaatttacactcccaataacagtgtaaaagtgttcctatttctccacatcctctccagtatctgttgtttcctggctttatttttttttgaaattttttgagatgccaactcactctgtcaccaaggctgagttcaatggcacgatttcaactcactacaatatctgctccagactcaagtgatcctcatgcctcagcctctcaaatagctgggactacaggtgtaataccacgaccagctaatttttgttatttttagtagagagggtggttttgccgtgtttggctagtctggaactcctgggctcaaatgatccacccaccttggcctcccaaagtgctgggattacagacatgagccactgtgcccagcccctttgcccatttttaactggattgtttggtttttgtttgtttgttttgctattgagtttgagtcctcatatattctggttaatttcttgtcacatggatagtttgcagatattttctcccatcctgtttgttgtctcttcactctgttgcttgtttcttttgctaggcagaagctttttagcttgatataatcccatttgtctattttcttggttgcctgtgcttttgaggtcttatacacacaaaaaatttgcccatacctatgtcctggagcatttctcctatgttttcttctagtagtttcgtagcttcaggttttagatttaagtctttaatttattttgagttgattttcatatatggtgagaggtaggggtctagtttcattcttctgcatatggatatacagttttcttcataaccatttattgatgagactgtcctttccccattttatattcttggtgactttgttgtggatgacttgactataaatgcctggatttacatctaggatctctattattttccattagtctatgtgtttgtttttaatgcaaatatcaggctgatatcatcactacagctttgtagtatgttttgaagtcaagtattgtgatgcttccagctttgttctctttgctcagaattactttggctatcatgggtctttgtggttccatataaatattatttttttctagttctaagaagaatgctgttggtattttgacagagattgcaccaggtagtattataattttaacaatattagttcttccaattcatgagcatggaatatctttccatttttcatgtgtcttcttcaatttttgtattagtgttttattatttttcttgtatatattttttacttctttagttaaattgattcttaggtattttacatactttttagctatattaagtgagattgctttcttgatttccttatcagattgtttgctattgctgtatataaatgctactgatttttatatgttgattttgagtgctgcaactttataaattaacttattagttctaacttttttttgacagagtatttaagtttttctaagtataagatcatgttgcctgtgaacaaggctaatttgatttcttcctttccaatctggatgccctgtacgtcttttagttgtctgattgctctggccaggacttccagtcttatattggataatacattgaaaagtggtgaaagggcacaacctggtcttgttcctgcttttacagaaaaggctttcaatttttccttactcagtatgatgttagtagtgggtttgtcatgcatggcctttattattttgagatatattcgttctacacccagtttgttgagggtatttattatgaatttgagttttactgaacactttttaaacatctattgaaatatcatgtggttttggggttttgttctgttaatgtggtgtttcatacttattgatttttgtttgttgaattatcctcgcatccctgggatgaatcacacatgataatggtgaatgatctttttaatgtgatgttgaatttaatttgccagtattttgttgaggatttttgcatcttgtttctaagtgatattggcctgtagttttctctattgttgtgtccttgtctgattttgttatcacagtaatcctgtccttgtagaatgaatttggaagtattccattctcttcaatatttttgaagactttgaggataaatggcattaattattttttaaatatttggtagaatttggcagtgaatctatcaggtccagggattctctttgatagaataatttttattacagctttgatattgttactcattattggattgttgcaatttcatgcttctttgtggttcaatcttgggtgcttgtatgtgtccaggaatttatccattttctctaggttttcccattttttggcatataattatttgtaataatttttaatgattctttgtatttctgttgtctcagttggtatgtgtcgttttttatttctgatttatttcagtcttctcattttttattagtctacctcagggtttgttaattttgttaatcttttcaaaaaatccaacttctttttattttgatcttgtgtattattttagtctcaatctcatttatttcttctctaatccttattatttcatttctcctactaattaggtgtttggtttgttcttgcttgtctacttccttagcgtgcatcatttggttgttcattctaagtatttttacttttttctatataggcatttattgctataaactctcctctctgaactgcttttgctgtatcccatagattttggtacgttatatttccattttcatttgtttcaaaattttttagaacttccttcttagtatttttttttgaccaatagtcatctaggagcgtgtttttaaatttccacgtttgtgtaatttccaaggttctgcttctccactgatctctggttttatcactgtggtcagaaaagacactaatatgatttctacttgttgagactcattttgtggtctaagagattatttattcttgagaatgtttcatgtgctgatgaaaagaatgtgtattctgtagctgttgggtgaaatattctgtaaatgtcggttagacttctttggtcatatgtgaagtttttaactcatatttctttgttgattttctgtctgagtgatatgtctgtaactgagaatggggtgttgaagtctcttactgttattgtatagcactctatctctccctttagatctattaatgcttgctttatatacttgggtgctctggtgttaggtgcatatatatttacaattgttatattctctcactgaattgacccctttatcattattgagtaggattctttatatctttgtatctttttacagtctttgacttgtagtttattttatttgatctacaaatagttattcctgctcttttttggtttccggttgcatggaaaccaatctttctccacctcttcactctcagtctgtgcgtgtctttataggtaaagtgggcttcttataggcagcatataggtgggtcttgttttttttttttttttgcttttgtttttgttttttacccattctgccactcaatgccatttaactggagaatttagtccatttgaattcagtattattattgataagtaagaacttactattgacattttgttgcttattttcctgttgttttgttactcttctgtttcttttttcctttcctactaccttcttatgtgataagtaatattctctggtagtaagattttatttgttgcctttttatttctagtgtgtcttttatagttttgtatgtgtgtgtgtgtgtggtttccataaggcctacaaagaatatcttaaagattaacaaattagtttaaatctatgacaaattatcttagaccacaaataatagaaacaaagaacaagtgaaaaaaaactgtatgcattaacttcatctctgtccctcaacattttgacttcatgttgtctcaatttacatgtttctatatcagatatctcttaataggttgttatagctataattgttttttcatagatatgtcttttgggcttcatactagttatgagtgggttgtacaccataattataattagtagagtattctgggtttgtcaatgtacttaagtttaccaggggttttataccttcaaatttttttttttttttgcacattactgttttgttttgttttttcttcagattgaagaactccctctagcatttctcataagacatgttggtagtggtaaagtctctcggcttttgtttatctgagtaaaactttatttctccatatttgatataaaaatttgctgcatataatattcttgcatggcaggtttttttctttaagcactatgataatgtcatcccacttcctactggctcatatggtttctgttgagaagtctgttgccagataaattggaactccttcatatgttatttgcttatttttttcttgctgcttttaggataatttctttgccttgacatttgagagttcaattattatataccttggggtagtcttttttgtccatgtctgtttggtgttctctgagcttcctgtacttggatatttaggtctttctcaagtattggaaacttttctattatttctttgaatatgctttctatccattattctggcttaatttccttttgaacaccaataattcttagagttggtatcttaaggtaatgttctatgtctttaggtgatcttcatttcttttcattcatatttcttttttcttcttcatgtattttcaattagcctgtttttcagctcactgattctttcctctgcttgttccattgtgctgttgagggcctctagtgagattttcagtttagcaaatgtatttctcacttctaagatgtatgtttgatttttaaaaattacaatctatattaaatttctctgataaatttctaagttgcttttctgtgctatcttggagatcactgtgtttccttaaatctgcttttttgaatgcttgttcagagagttcacgcatcacagccactagggtcagtcactggtttcttgctttgtccattgggaagatcatgattccctctttgctgatgtgtgtgtgtgtgtgtgtgtacatcaccgtttttgcactaaaggattagttgttgaatccagtcttctctgtcggcttattttggtttttattggacatgtttccttagatgtttttataattagctgctggtttgctttctcatctttttttttcctgctgggttgctgcctcctttttagcactaggtggcaccttaagcccaggttggcctcaactctagtaaacagtcggagggctgctcatcttaagtgggaggggttccaaagggaatgtcccaatagtgtgggaatgctggttaggagtttgtgccctaagaacctgcagaacatacctcctatagtatagtgccgctgaacagccattctgatttggtgtcaactttggccaagttacctatcagagtttccagggttgaggatgatagtcttatcaccccaccttgtctctggctgtcttcagagatatttctccctttaggcacttgcaatgcttcctgtagattgatactggaatagacttcctttcagggatcccaaggtgatggggaagctggctgttagccttgatttcacctttttctgtgtataaattgtgaacaaggggaaatttctatgcacttggttacagtcagattgaagggagaggcatcaaggatatagaattccaattctctttccatctgctcagagttttttcacttctctttggctctgggaactgtgtcttcctcatattttagttccaagacattggcagtgataatctcagtgctgcatatttgtttttggttttctatggtgggtaggttaagtcagctttcttctacactgctattttggaaccagaaatcctatacattggtaaaaataaagtaggaaagaatagaaagcactagaccaactcttcatgaaatttatgtgtgaattaaaggaaatatgtttatacttattagaatgtacccaaaaattgttgcgatcataaatatacacattatagattgatgttagatagatggatagatatacaacatatagaagaattaagtctgattgcttccaaatggaaggaaacctctaggagagtaagattgaagagcagaagcaagaaagtgaatttatgaaagaacaagttccccaaataagcaaaaaataaaaacaaaccaaattatgtatataattgggagaaaaaccaggaaaggaaaaaatagaatatcttccttgaagaaatatttttaagaaaaggaaaaggccgggcgcagtggctcacgcctgtaatcccagcactttgggaggtcggggcgggtggatcacgaggtcaggaaatcgagaccatcctggctaacacagtgaaaccccatccctactaaaaatacaaaaaaattagccaggcgtggtggcgggggcctgtagtcccagctactcgggaggctgaggcaggagaatggcgtgaacccaggaggcggaggttgcagtgagctgagactgcgccactgcactccagcctgggcgacagagcgagactgtctcaaagaaaaaaaaagaaagaaaaggaagaagtggatgaaagtagaaaacttttgagacaatgtaggacagaggaaactttcatacaagagccttattttctaaaaaaaaaaaaaaaaaaaaaaaaaggaaataaagggtcatccatggtaaccaaaagcagaagaatagaagttaagtatttaccaagtctggaaatgtgttttatagcgaatataaaagtgtaaattcacaatgactagaagccttattgagcaagaatgaagaggttgactaaaattaaacagaaggacatgctagtgaacatattccacccatggttaattgttactatcaagccttagcagaaagcaaaattggaaaaaaagaaaaaaataaattcacctactatgtaaagtagatgaatttatgttaggaagaaaaatcttaaggacattaagaaaacaaatattattatcatcttacaattacataaatttaaaacctagcttttacaaagtttgaggtttttattttacctttggaaaataaagttcagaaattgtagagtgatattgaaaaaaatttaactgtttagaaatgcaagtactatcaacatcactgtctactgtgttcaaagataagtattaacactgatattatccaaaacaggaataaaaataaaaactatgctgaatgaggccataagattttctcctttttcaacaacaaaagtgattaactgcacacggttactgcttttacgttgtaatgctatattcctcaacaatggtgtcttccaaaatgagtctctttttgtttctgaatgacaataaccaagagttatgggctgaattgtgtcactccacagttcatatattgaagccctcactcccagtacctcagaatgtgtctctaactggagatagagcctttaaacaggtaattatgttaaaatgaggccattagggtgaatccttatctaatatgacttgtgactttatagaaacaatgaattccggaaaggagatggagcaagatggcctaatagaagccttcactgattgtctaccctgcaggaacaccaaattaaacaactatccacacaagaaagcaccctcagaacaaccaaaaatcaggtgagtgatcacagtacctgacttaaacttcttgttactgaaagaagcatggaagaggggtaagacagtcttgaattgccaacactaccactcccacagcctctagtggtggccacatggcacagaaagaaaatctgttttcctgggggaggaagagtgcagagaccgtgggactttgcattggaactcactgctgtcctcttaccccagaaagcaataccaggcacaacgcagccagtgcctatggagggagcatttagacctgccctagccagtggggaattgtccatcccagatgtcagaagacgaattcaggcaagccccaccacctcacgacaaagtgttctatggtcctaaataaaattgaatggtagtctaggccacaagaactgcaaatactgggcaagtcctggtgctatgctgggcacagagccagtggacttgagaagcacatgacctaatggaacaccagccagagtggctgagagaatgcttacatcactccaccccagccacaggtagtataacttgcagctccagaagacactccttccctccacttgagaagaaagagaataaggcggacttcatcttgcaacttggataccatctcagctacagtagaataggacactgggcagagtcctgaggcccctattccagaccctagctcccagatgacatttctaggcaccttgggccaaaaggtaaaccactgccttgaagggaaggacccagttctggcaggatttacaacctgctgactaaagagcccttgggcactgaataatcagcagtggaacccaggtatttgctatggtccttggtccttgggtgagactcagagagctgctaacttcaggtgtgacccagcacattcccagctgtggtggctctgggaagagactccttctgcttgagtaaaggagaggggagagtaaagggaattctgtcttgaagcttaagtatggtttggctacaaggaagtagagcaccaagcaggctcttgggatatttgattgcaggccttggctcttagatggcatttctagacctgcctggggccaaaggggagcctggtgtcctgaagggagagtcccagtcctggaagcattcaccaaagctgacagaagagcccttgggccttgagtgaacattaccagtagccaagcagtacttgtccatggccctggggcagtggtggccatggtgagagactcctctgcttgcagaaaggagagaaagagtggacaggacattgactcatgacctgggtgccagctcagccacagaatagagcactaagtggatccctaagatttccaactcccagatactggctcccagatagcttctttagacccacctggaactgggggtaactcgccaccttgaagggaagcccacaagcctgattggctttgccacctgcagattgcagaaccctcgggccttgactaaacataaccagtagccagggagtggttcctgtaggctgtgagcaagacccattattgtgctagcttcagttctcccacaatgcagtcctagtggtggtggccacaggtgtgctggttccacctttccatcagctccaggcagctcatcacagagacagagagacaacatttgtttgggagaaagtaagggaagataacacggttctgtgcctggtaatccacagaattcctctagatattatcatagaccatcaatgttatacttcacagatgtggctgcagtgaccaaaaatctagacaacacccaagtcacttcaaatacctggaaaccttcccaggaaaaatggatacaaacaagcccagactgtcaagactaaaataaatatttaactcctactgcgtagacagcaataacatccataagcaataagaccatttaggaaaacatgacctcacaagatgaactaaataaggcaccagggaccaatcctagacagaaagagatatgtatgtgacctttcaaaaagagaattcaaaatagctgctttgaggaaactcaacaaaattcaagctaacacagaggagaaattcagaatcctatcagataattttaacaaacagattgaaataattaaaaggaatcgagcagaaattttgaggttgaaaatgcgattgacacactgaagaatgcatcagagtctcttagcagcagaattgatcaaaacaaaaatgaattagtgagctagagacaggctatttgacaatacacagtaagaagagacaaagggaaaaaataataaaaaataaggatgcacacctacaagatctagaaaatagcctcaaaaggacaaatctaagagaaattggtcttaaagaaaaagtacagggagatgaggtagaaagtttattcagagggataataacagaacctcccaaacctacaaaaagatgtcaatattcaggtacaagaaagttatagaataccaagcagacttaacacaaagaagactacctaatggaatttaataatcaaactcccaaacatcaagaataaagaaaggatcctaaaagcaggaggagaaaagaaaaaaataacatacaatgaagcttcactatgtctggcagcagacttttcagtggaaaccttacaggccagaacagagtggcatgacatatttaaagcaccgaagaaacaaatttttgccctagagtaatataaccagtgaaagtatcattcaaacatgaagaagaaataaagatgttaacatgaggaagaaatataaaaaaaaaatccttcaaacatgaaggagaaataaagactttctcaaacaaaagctgagagatttcatcaacaccagagatgatgtacaagaaatgctaaaaaagttcttccacttgaaagaaaagaatgctgatgagcaataagaaatcatctgaaggtacaaaactcactggtaatagtaagtacacagaaaaacatagaatattataacattgtaattgtgatgtataaactatgtattaagtagaaagtctaaaagacaaacttatcaaaaataataacagcaaccacatttcaagacatagacagtagaatgagacataaatagaaacaataaaaaggcaaaaagcaagggaatgaagttaaagtgtagagttattgttggttttctctgtgtttgtaagtttgtttatgcaatcagtgttgtcatctgtttaaaataatgaattaaatgatattatttcacaagcctcatgctgaccccaaacaaaagaacatacaatagatatacaaaaaataaaaagcaagaaattaaaacataccactagcaaaaatcatcttaaataaaaggaagatgggaagggagtaaagaagaaagaaaagacaacaaaacaatcagaaaataaaacaaaatggcaagagtaacttcttacttatcaataataacattcaatctaagtggactaaactctctaatcaaaagacttagagtggctgaatggatgaaataacaagacccagtgatctgtttgctatgagaaacatacttcacctataaagaaacacacaaactgaaaataaagaaatggaaaaacatatcccatgcaaacagatgccagaaaagaacaagagtagctatacttacatcagacaaaatagacatcaaatgaaaactataaaaagagaaaaagaagttaattacatagtgataaagtgatcagttcagcaagaggatataacaattgtaaatatatatgcactcaacactggagcacctagatgtataaaccaaatattattagagctaaagagagagatagaccccaatacaataatagctggagacctcaacaccttactttcagcattggacaaatcatccagacagaaaatcagaaaataaatatggaacataatctgcatgatagaccaaatgggcctaatagatgtttacagaacatttcatccaatgactgtggaatacacattcctcttctcagcacatggatcattctcaaggatagaccatattttaggcaacaaatctttaaaaattcaaaaaagtgaaattacatgagtatcttctctgatcacaatttagtaaaactggaaagtcaataacaagaggaaacttagaaactatacaaacacatgtaaattaaacaatattctcctaaatgactagtggctctctgaagaaattaacaagaaaattgaaaaatttcttgaaacaataatgaaaacataacataccaaaatctagaggatacatgcaagcagtactaagaaggaagtttatagctataagcacctatatcaaaaaggtgcaaacgtttcaaataaactactttatgatgtatcttaaagaactaggaaagcaagagtaaactgaacctaaaattagaaaagaaaaaaataataaagatcggagcagaaacaaatgaaattgaaaaaaagaaaacaatataaaagaccaacaaagcaaaatttttttaaaaaactaaaaaaaattgacaaacctttagccacactaagaaaaaaaaagagaagatctaaattttaaaaatcggagatgaaaaaggaaacattataaattataccacagaaattaaaaggctaataatgaatggctgctatggcagctatatggcaataaactggaaaacctagaagaaatggataaattcctagacacacatgacctaccaagattgaaccatgaagaaatcccaaatttgaacagaccaaaaacaagtaatgagacagaatccatagtaaaaatactcccagcataaaaagctcagcacccagtggctttgttgttgaattttaccaaacatttaaataacttatactgctgggcgcggtggctcacgcctgtaatcccagtactttgggaggctgaggcgggtggatcatgaggtcaggagatggagaccatcctggctaacgtggtgaaatcccatctctactaaatgtacaaaaaattagccgggtatggtggcaggcacttgtagtcccagctacttgggaggttgaggcaggagaatggtgtgaacccgggagacggagcttgcagtgagccgagatcgcgccactgcactccagcctgggccacagagcgagactccgtctcaaaaaaataaaaataaaaataaaaataaataaataaataaataaataacttataccaatcttactcaaactatttaaaaaaatagaggaaggaacacttccaaacttattctactaggtcagtgttaccctgataccaaaaccagacaaagacacatcaaaaaaacaaacaaaaacctataggccaatatcactgatgaaaattgatgcaaaaatcctcaacaagtaaactaaattcagtaatacattcaaaagatcattcatcttttaaggagaccaagtaggatttatgccagggatgcaaggatggttcaaaatatgtaaatcactcaatgtgagacattatatcaaaagaataaaggacaaaaaccatagaatcattccaattgatgctgaaaaagcatttgataaaattcaacataccttcatgataaaaatccttaaaaaatctgggggtagaaggaacacaataaaagccatatataacaggcccataggtacaataatactggatgggaaaaacatgaaaacattttctttaagatctggaccacgacaaggatgaccactttcaccactgttattcaacatagtactggaagtcccagctagagcaatcagacaggagaaagaaagaaagggcatgcaacttggaaaggaatgagtacaatcacctttgtctgcagatgatataatttaataattggaaaagcctaaagactgcaccaaaaaatgattagaactaagatattctgcaaagttgcaggatacaaaatcaacatacaaaaataggtagcacttttatatgtcaaaggtaagcaatctgaaaaataaatcaagaaagtaatcccattaacaatagctacagataaaattaaatatctaggaattaagttaatcaaaaaaggaaaaggtctctatcatgaaaatgaaaatactaatgaaaaaaatcgaagtggacacaaaagtggaaagatatttcatcttcatagattggaagaataaatattgttaaattgtctatattacctaaagcaatctataggttcaatgcaattcccaacaaaacactagtaacattcttcacagaaatagaaaaaaaatcaaaaaatttatatggaaccacaaaatacccagaataaccaaaactatcctgtacaaaaggaacaaaactggatgaaacacactgcctgacttcacattatactacaatactacagtaaccaaagcaaaatggtactgacataaaaacagacacatagacaatggaaacagaatagacaacacagaaacaaattcatacatctacagtaaactcatttttcacaaagttgccaagaatatacaatggggaaaaaatagcctcttcaataaatgctgctgggataaatgattatctataatgagaagaatcaaattagacctctatctcttgccacatacaaaaatcaagtgaaaatggattattaaagacttgccaaaacctcaaactataaaactactaaaataaaactttgggaaaactcttcagaacattgcacagggcaaaaattaccgtgctgcgagtagtaccccgcaagcacaggcctccgaaccaaaaatggacaaatgagatgacatcaagctaaaaagcttccacagcaaaggaaacaatcaacaaagagaagtgtcaacccacaaaatgggaaatatatttgcaaactatccatctgacaaaggttaataaccagaatacataaggagctcaaacagctctataggaaaaaaatctaataatccaattaaaatatgggcaaaggatttgaatagacatttcttaaaagaagacacacaaagggcaaacaggtatatcaaaaggtgctcaacatcattggccatcagagtaatgcacatcaaaactacaatgtggtattgtctcatcccagttaaaatggcttttatccaatagtcaagcaataacaaattctggcaagaatgtggagacaagggaaccctcatacactgttagtgggaatgtaaattattacaaccactataaagaacaatttggaggttgctcaaaaactaaaaatacaactatcatatgatccagcagtcccactgttaagtacacccaaaagaaaagaaatcagtatattagagagatatctgcacacctatgtttattgcagcactattcacaatagccaagatttggtagcaacctaagtgtccatcaacagatgcatggataaaaaaaatgtggtaaatataaacaatgcagtactattcagccataaaaacgaatgacatccagtcatttgcaacaacatcgatggaactggagagatcattacattaagtgaaataagccagacacagaaagacaacttcccatgttctcatttatttgtgggagttaaaaattaaaataattgaactcatggagacagagagtagaaggatgattaccagaggctgggaagggtagttgaaggatagggggtaatgacagatagtcaatgggtacaaaaatataggataaaaaaagatctagtatttaacaataatttattgtaaatttaaaaataattaaatataactagatggtttgtaacagaaagaataaatgctttaggtgatagataccctatttaccctgatgtgactgttatgcattgtatgcttatttcaaagtatcccatgtaccccataaatatatgcacctactatggacccacaaaacttaaatataaagtaaaaaaattaattaatgagtgaattgtatggcatctaaattacgtctcaataaagctgttacaaaaatcggaaaaaaacaataaatttgaataagcagaaataccaagaatgaggaagcacagtgaaaaggctaccgtttgcgagcaaaaaggctgccatctccaagccaaggagagttgccccagaagaaactaaacctgccaacaccttgatttggacatctagcctcaagaactgtgggaaaataaatctatcctttttaagccatccagtctgtggtatttcattacaggagccttagcaaactaatatacccagtttttctgctttgttttgttttttaccctttaattgtaattcacaacgtggatttttttctaatgtgcccttcagtattttactacctgcccctgcgagatttcctgtctttcaaaatcaagtctagcaaagctgacctagagcagggtaagtatctccatgctgaaagactgagctttcctacaacctcacaattaagaatgctttcatgctacttaaaattaaagatggctgctaaaacaagaacttgcaggtagccatttagcaacgtttaaaaggtaggctggagttcattcaattttgtctttagtgcaaggcccaagtgtttggcaccttcctcatcagcttccaaaggaaatgttaggctttgctgattgctgatttattttatgttatttatttatttatttttgagatgagtctcgctctgtcgcctaggctggagtgcagtggtataatcttggctcactgcaacctccacttcctgggttcaagttattcttgtgcctcagtcccccgagtagctgggattacaggggtatgccaccatgcccagctaatttttgtatttttagtagagacggggtttcagcatgttggccagggtggtctcaaactcctgacctcagatgatccatccgcctcagcctcccaaagtgctgggattacaggcgtgagccacagcacccaacctggttgctgatttattgatgaccattttaggtttcacaaatactgctcttatcattgcacaagattatgaacaaatatcttgttttctctagtcaattctcatgtttaacgttggcttgatgtcttcatctccaaataatcatatttttccctcttaattatagagcaaatgaacaatgagatggtatgactcaattagattgctgcattactgaatgcagaaaaactctcatgttctcctatcaccttcgtacccactccactccaacattcattcacagtttatttgtccgtaggtaaataccaagaaagctagattaattagagctcttccctaggtagtttttgcaaactagaccaaggaaagaaaatatgtcttggttgaaggagttcgagttatgacccttaacaactatgagcagccacgtgccaccaatttggaataattacttttacagtgagagggaataaagtggatatgggaaataatagcatccagctcacagggttgtaagacttaaatgggattatgtatgtaaagtacttaccaccattcaatagatgctggcaaaaacaattaaaactaagaagggtctcagattttagcctgcttgtaagccaacaagcagcctgccactgtttcatgaatgctggcagaagacataagactcctcagctagaaaaaaagggtgttattacttttggcacagtgggcagcaagagcttcaatgtaaacactggcctctaagtctcatggtcatgacagaggcaggcacaggtggatgctgtaagcacaatgagtgtgtgtcacagctgagaaatccaatcttaggaatctccaattgtttataacgggctgcctgaaaacctgctcaacctttgccctggaggaaggcattatctttattatacttgacaacaaacaaacctgtcatctgttctaggggcaagaccctgtctctgtcttacaaggctatttgctatacatacatccttgaaaagacagtctggacaaaactgtgaatgcctctggttaaaagaagtgcaggtatgagagacccatggagaattctctttgaacaataattaatagatatttagaattgagagcactgagatatttattgagcattagtaaataaagaaacatggatttagaagctaaattgctggtaatattatgtaatctttgatttaatagatgagaagccttgtcctgggtaaggaaattaatttagctttagcatagagaatatgagttatctatagcacatacaatgaaaatattcaatgagaaactggaaattgattcagatgatagaaaaatattaaaatctggttataccaacattgcaatcatacttacaaaaaggtcaactagtactttcttttcctcattatgatgactttcaagctcaggggtcaacaaatcagcccataggttaaattctgttcactacctgtttttgtataaagttgcattgaaacacagccacactccatcctgatatttttgtttaaatcttagattcaaaggatacatgtataggtttgttacatggatatgttgcataatgctgaggtttgggcttcagttgaactcatcacccaattagtgaacacagtacccaatagatagtttatcaaccattgccccctccctccctttccccttaggcatccctagtgtctctctgtttccatccttatgggcacttaggtagatgccatgtcttttctattgtgaatggcacaacacaccctttcatttatatattgtctgtggctgcattcatactacaatggtaaagtttgatagtagcaacagaaatgactcacaaagccaaaaatatttactatctaattctttacagaaaaagctggctgccctctgttctaaactcttaaatttgtggatcagctcatggaatcaacttaagtgtccataacggatggattggataaagaaaatgtggtacatatgcaccatggaatactacacagacattaaaaaaaatcacgtccttgtcagcaacatggatgcagctggaggtcattatcctaagtgaatcaacacagaaacagaacatcaaacactgcattttctcgtaagtggaagctgaactgtgggtacacaggaacataaagatgaaaataatagacactgggggctctaaaagtggggagagaaagaggaggacaagggttgaaaaactacctattgagtatctatgttcactctttgggtgatgggttcaccagaatcccaaatgccagcattatgcaatacacccatgcaataaacctgcacatgtacccctgaatttgtaataaaaatttgaacatcatcagtccttctttccaaagttttatattataaaaccatatctactttttctctgaggctactttgcatttacctagttgtattttccccaagtaattataatccagagaaagaatgagttaaatgctatatcagtggtatacattgcaatgatagaaccaagaaagaaaaaaaaattaaaaaatagaaactcacatgggaaaattttggaatgtcctcccagaagatgtggtttaaggagggcctttaaggacggttaaaacactgacacacaaaacttcatcactggtgaggaaattacacaagtaaagaaaggaaaggagtttgtggcaaacaaggatacatagatcagggaaccaaccaaggttaggtcaaagcaataggatacaaacacactatttttcatattgttttgtgattcaagttctgtaactgcttaaaagtctgggacatgtgtgcattatgcagaatgagaaggaaaagttagagtcagcaaaaagaaggccaagataacctgctgtgacaagcaaagcaaatgagaagcttgttggacaaaaatagattctataatccaatgccttttcctgattgttgacagaggcagagtagatgtgcataatatggagcatttgtcaaggtgatgtcaaaagatgatgcttcccacctgggaacttagtttaggattatgacttacaaagcgcaagtaaagtcatgaatgcagagatcattgcaaaaaaaaaaaaaaaatctgtcattaaaagtctttatataatctaattatataaatttggaatacatattgaaaagctatcttaaaaagaggttgttttgaagttttatatcatgtttgtaaaaataatttgaggtaaaaagtgtcttctagttgcatcaggctatgacaagtcatgatttcattaactctgtagtttaccataacagtctagttgtatggttgttaagggcattgaaaattatgtattaatatttaattccctttttaaatatttgtgtggttctcttataccacttccatatgtggtggctatgaatttcagtccataaacatgagggctcaggaaatagcactttatttgctgtaacaagttttatatgtatgtatgtaacaagctcagttttatttctgagctgaagttgatttttcctcagtcacttattttttcttccatccccaagaccattccatggtttcagtatcttcagttaatgtcaaggtattgtgggagggggcactgtctggacatcaatcatttttcttcacagacaactcttattctttacatggctgcttcagttctgtcaattccctttagcttccatgccttgactgaggcccagcaactcttctctttttttgagatcctgcaagaaaagatgaccctctgttgccctggctggagtgcagtggtgtgaacacaactcactggagcctcaatctcctgggctcaagctattctcctgcctcaggttcctgagtagctgggaccacaggtacatgccaccatgcacaaccaatttttaaaatgttttgtagagacagggtctcactatgttccctaggctggtctcaaactcctgggctcaagtgatactcccacctcagcctgccaaagtgctgggattataggtgtgagccaccatgcccaggctccagtaacttttttaacggctgtcttcgattcttcttactagaatcaccatgcagccagttctctttacgatttgtttatcttactccctccacagaggcacttactaggaaagagaagatcatctctactcaggatttaccatccactttacctccttgctaaggtaatttcttttatgagtctctttgttagtcaatttgtgttactataaagaaacacccaagactgggcaattcataaagaaaagaggtttgttttagctcacgcttctgaaggctgttaggaagcatggtgctggcatctgtttccagtgagtcctcaggaagcttacaatcatggtggaaggggaagtgggagcaggcacatcacatggcaagagagagagcgtgtaggtgccaggctattttaaatgactaactctcacgtgaatatctgtgaactgacaatgagaactcactcattaccaggggaagagccccaagccactaatgaaggctatgccttcacgatccatacatctccaccaggcctcacctccaacactggggatcacatttcaacatgagatttggagaaaacacacatcgaaaccatattagtaggtaagaaaaatgccccttcaaaatgctctagctagctccttctcaatccctttcctgtggaaagtcaactgctcagtagtatgagtcagtgactttggagctaggaaggaacttggtcaccataaccagcatgttttacaagactgacaccaacaaacctcttcaaattttcgaattagttgaagacaagaagatttagcaaataagtgagtgaattcagaataatagaaattgggtgtctactgttgaataaagaaggtaaaaatacttaagggagaatggctggagtaaatttgaggtatcagtgtgaacttaatgattttcaatataaatatagatacatagatatatgtgtatgtgagtttgtatatgcacacacataattttctagctatcctgtaaggagtcctgaaagcaatggcacactggcagtaattagcacaaaccaagtccccagattttgggttctatattcattctccaataaaagaaacctgattctttgagaaatggctgatttcagggcatgggttagaaaacaaatgagataaatctagagcattctatcatggcaaaatgtaagaaagcttattcaaagattaatggggacattttaaaagaacaaaaaaagttgagttgaagggaacccactgattaaacctgcaaaaattttagcatcaaaataatgataataacatattgtaacctcttgaataaagtaggaatagaaaataagctcctgccttatagtagaatgccaactaacaaatatagaagggaggatggaattagaaaagcaccgcttggcaataatcttagaaatcattgattcagaaaaggattatcaatggatgctaaaattagtagatgagtatttgatgaggaacaggctatttacatagtctgaaagtatgtttccacaaaatacttttatttacttgttatttaataagtttgagatacttattaattaacattaaaatgaagaaaatctgacagattattttaaacaaatggtaaatgatatcatcaatagtccaaatatttatgccttctattaggatggactaagaacagtgcattatttttgtggtattcctgccaaaaacatgcataactgaaaataaattataagaaaacaccacagaaaatctgtatcttttttaaaagtcaaggccatgatacatgaagaaagatttcaaaagtctaagaggtatggcctttaaatgcaatgtgtgctcctgaattggttcattgaccaaaaaagaaatgaagaaaaggggaaacaatttattttactctataatgggcactataaggaaaactgggaaaatctgaagttctgggaattagacaacagtattgcattaacgttaattttcttattttgttgggtgtattagggttataaagaagaattcctttgcttttaggaaacagaaaatttcaggaatttgggccgtcatgtctgcaacttgtaaacagctcaaaacagaaaaagagagagaagaaaaatgtacaatgttaaaaattgtggaatctggacaaagtttgtagagttctttgcactgttcttacaactattctgaaagttcaaaattaaaatttaacccaaaaatactattgatatatcttaaaattcaaactctattttacttcctcactgtttgtaattctgttaaggccataagggtttgtaaaataaatgccagaaaagcttgcagacaacttttactttctactcttccacatatctcttttaaacaaatttttgtcaaaattttgtgagtacatagtaggtatatgtatttatgggtacatgagatgttttgatacaggcatgcaatgtgaaataagcacatcatggagaatggggtatccatcccacatgcgtttcttctttgagttacaaacaatctaattacattctttaagttattaaaacatatacaattaagttattattgactataatcaccctattgtgctatcaaatagtaggtcttattcattctttccatttttttgtacccatttaccatgcctccccccaacctccaactacctttttcctcacctctggtaaccatcctattctctatgcccatgagttcaattaatttgatttttaaatcccacaaattagtgataacatgtgatgtttgtctttctgtgcctggcttatttcactcaacataataatctccagttccatccatgctgtggcaaatgactggatgtcattttttactgctgaataatactacattgttcatatttaccacaatttgacacttaggttactcccaaatcttagttattgtaaacagtgctgcagtaaacacaggtgtgaatttatctcttcaatatacttatttcctttcttttgggtatatacccagcagtaggattgctggatcatatggtagttgtatttttagtttttgaggaaccttcaaactgttctctacagtgactatattaatttagtttcccaccaacagtgtgcaatgcttcccttttctccacatcctcactagcatttgttattgactgtcttttggatattagcatttctaaaatgctttcgatttgcgtttctctgatggtcaatgttattaagcaccttttcttatctgttagccatttgtgtgtcttcttttgagaaatagctattcaaacattttgcacattttttcttatagagttatttgagcttcttatatatactggttattaatcccttgtcagatgaataatttgcaaatactttttctcattctgtgagttggctcttccctttgttgctcatttttctaagcaaaagctttttagcttgatgtgatcttatttgttcattgctgctttagttgcctgtgcttgtagggtaatactcaaggaattcttgcccagaccaatatcctggagattttccccaatgtttcttttagtagttttatagtttgaggttttagattttagtctttaatcgatttttattttatttttgtagatggtgagagataggggtctagtttcattcttctgcatatggatatcctgtttgcccagcactatctttgcccatttgtagtgatgttcttgttgtcgttttttgcttattgacttaagtttcctagagattcttgatattgatattaaacctttgtctgatgcatagtttgtgaatatcttcttcaattctgtaggttgtctgtttattctgttgatacatttttttgtttggttggtttttaactgtgcaaatgctgtttagttttattaggttccacttgtcaatttttgtttttgttgcaatggcttttgggcacttagccaaaaattatttgccaaggctgatgttgagaagagtatctcctaggttgtgttccattatatttatagtttgaggtattaaattcaaactttaatctattttgcattaatttttataaatgatgaaaggtaggggtctagccttaatattgggcatatggctagtcagttgtcccagaaccatttattgaatgggaagtcctatccccattgcttgtttttgtcagccttgttgaatatcaaatggttgtaggtgtatggctttatttctgagttctgtactctgtttcatgggcctatgtgtttgttttttgtaccattaccatgctgttttggttactgtagaatagtatagtttgaagttaaatagtatgctgcatctggctttgtcctttttgcttaacattactttggctacttagactcttcattgcttccatataaattttagaatagttttttcctaattctgcgatgaatgacattggtactttgataggaagtgttgaatctgtaaatttccttagagagaatggtcatttttacaatatcaattcttccaatccatgagcatggaatgttttgccatttgtttatttcattttctttgggactattgtaaatgggattgtgtccttgatttcattctcagcttggatattgttcattaatagaaatgctactgatatttgtacattgattttgcatcctgaaagtttactaaaattgtttatcagttctaaaagccttttggtagagttctttggatattctaggtatagaatcatataatcagtgaagagagatagtttgactttctcttttcctagttggaccccttttaattctttctcttgcctgattgctctgagaaggacttccagtacttagttgaataggaatggttgttccagttctcaagggaaattatttgtgcttttacccattcagtataatgttgactgtgggtttgtcataaatggctcttattattttgagatatgttcctttgatttctagcctattgagagattttattatggaggaatgctggattttatcaaaagctctttttttcatctgttgaagaggtcatatggtttttgcttttaattctgtttatgtggtgaatcacatttattgatatgtgtatgttgaaccagccttgcatactaggaataaagcctacttggtcatggtgtattatgctttgatatgctgctggtttcagtctgctaatattttgttgatgatatttgcatgcatgttcttaagaaatattggcctaaagttttctatttttgttgtgtctctgccagacttttatatcaggctgattttttaaaattaattttgtaaaatgccatggcaattatttaatactacaactgcctgaggcaccaatactagctggtcaaacaaaaagctgaccaagaagaaaacaaacaaaaaaaatcaggtaataatgcaattaaaagtactataagccatctgggtttgaaggaacaagtaaaactatgtatactcacaagtgacttaatcttaaatgaataaagtcctaagggttccacacacgcctgaaaagctattcgaacgaatcagtgactttagctaaattgcaggaccaatatacaaaaaccaactgtatttatccaatagcagtgaacactccagacataaaatttaaagaaaaatttcattcacaattgcctcaaaaaagaacaaaatacttaaaaataactttaacaaatgtgttaagacttatacattggaaacaacaaacattgttgaaatgaagtaaagaagacataagtaaatgaaaagacattatattcataaattgaaagacctgatgtggttaagatagcaatactcctcaaatttatccacagattcaacacaatacctatccaaatcttaactacttttcttcttgcagaaattggcaggatactcctcaaatttatgtggcaatgcaaaggacctagaatgggcaaagcaatcttgaaaaaaagaataaagttggtgcactcattcttcctagtttgaaattcactacaaagttgcaataagcaagacagtgtggttctggcaaaaggttgtaaataaattaatggagggtttttttgttgtttttttgttttgttttgttttgttttgttttgagacggagtcttgttgtgtcacccaggctggagtgcagtggtgcgatctctgctcgctgcaacctctgcctttgaggttcaaatgattcttctgcctcagcctcctgagtagctgggactacagctgcgtgccaccacgtccagctaatttttgtatttttagtagagagagggtttcaccatatttgccaggctggtctcgaactcctgaccttgtgatctgcccacctcagcctcccaaactgctggaattacaggcatgagccaccaggcccagccattaatggagtattgaagaggatgtcctttccccagtgcatgttcttggcacctgtgtcaaaagacagtgagattaaaatgcataaacttatttctaaattctatgttctgttcctgttttgtagcctaatctgtggtttaccctggagaatgttttatgcatcaatgaaaagaatgtctatactgcagctgttaaataaaatgttctgtaaaagtctgttaggtccgtttgctctaccatgcagtttaaatccaatgcttctttgttgatttactgtatggatgatttgtccaatgcttagagtggggtgttgaagttttcaactaatattgcattagagtctatctctccctttagatttaataatatttgttttatatatctgggtgcagtagtatagggagcataaatatttacaattgttatatccttttgtggaattgatccctttatatttatataatgactttctttgtttatggttttttaatcaatgactgtttctttaagtatagctactcctgctcattctcatttttggcttccatttacacagaattttttttcccattctttctttttttgtctatatgtgtttttacagtgaaataagcttcttgaaggcagcatacagtatagtcaggtggagagttaaatctgttcacattcaacattattattacgaggtgaggacttactcctgtcattttgttaattgttttctggttgttttgtatatccttgtttcctttctttctcttttattatttatcattgcagctgagtggtattctgtagtggtaatatctgactcttttctcactctcctttgtgaatctgctataccagtgagttttatacttttgcatatttgcatgatgatgatgatgatcttttcactttcaaacacaggactcccttgaatgtttcttgtatggcagatctagtggtgattaatttcttgtttttccttgtttgggaaagacttccttcctccctcatttctgaagaatagctttgctgagtatagtagttttggctgccagacttttttctttcagtactttgaatataccatttcattctctgcttgtgagtaaggtttctgctaagaaatctgctgttagtttaatgggcattcccttatatgtaacttgatgcttttctcttgcagtttttagaattctcagtctttgacttttaacaatttgactaacacatgattcaaagaagccctttttgggttaaacacatttggggacttttgagcttgcttgatctgaatgtccatatctctttccagacttagaaagttttcagcattttttttattaaagcagttttctatgcctttttaatctattttccttctggaaattccataagacaagtatttctttgcttaatgccatttcataaatcttgtagacttcttgactcttcttcattcttatattgattttctctaagtgtataatttcaaatgacctatcttcaagttcagaaattctttctcctgcttgatcaaatctgcagttaaagctctctattgtatttacaatatttcattcattggattcttcagctgcagtatatctgtttgattcttcttttacgatatctatatctttgatgaatttcatgttcatatcatgaagtgtcttcctaggaactgtctgtattttcttgggtttccttgagtttcccgaatatcactattttgaattccttttatggcaatttgttgatttcctttttgttggaatctaatactatagaattattatgttcctttggttgtgtcatatttccttgctttttcatgtttcttgtgtttctatgttgatgtctatgcatctgataggacaatcacctttttcagattttctagagtgacttttgttaagaaacacttttgggaaaggtattgtggctcctgcacatacagctatgtgcatgggtggtcttttagattctgtagctgaattcaacattagtaataactgtgggtgtctcagtggcctatgtggtagaaatttgtggtaatagtagtggtggcatagattgtaaatatctttggaggtgtgggatttgggggttttctgtacctccacctgcattccccataatggagagatagatggggatatttctcttagtattaaatctaatatggcctacaagcagctgccatggtcctagttctgggtgcaggtactcagagtggctgtggagccagggccctaggcttagtgtcttgtgaatccattgtggcacctaaatcttagggtgcaggttggctttctctgtcagagttggatgtagggtgcccacggcacaaggatctgactctgatgcaccctgtagcagctcaggtctaggaggtgtagttgaagctctgattatacccctggatagcagaacacagacctggcctgactctaagggagaaagagagttctgtgggtttaagcctggagtgcagggtacagttgtaattcaggagcctgagataatagggttcagtggcaacttgcgtccctgcagatgagatatcatgtagtggtgaatctagaccttaggatgatggggcttagcagtatcccaaactgttgaggccaggtgcagcagcagcaagcaccctaaaatgactgagcatggctattgtttgagcccaggtgggaaaggcaagaagcaacacagcaatgattccactccatcccggggaatagagtcattgctgtgctgcttcttgccccccagggggtgtctcagaagctcagatgctaggggtctagtccagcttcagggaagcaagattctacagttgtttggcctgtagcgtggggtgtctcagctcagcttctactctgcttccctagaacgggtggtgctatctcagtccagctctggcaagtggagctacttatctcagccaaggtaatagttatccaggtgcaatgtgccacttcacctcaggcctgggaagtgtgactgttcttggtgtcccgggcctagaaatgtattttcagcctgactccctgtaatgtcaactgtgtaaaacttaggaatctctaagcaatgagtaaggcagaagcatagaattcatcattatttcatcttgctgtccaactttttaaaatagtcccctctctatattccatatatagtatataaatagaatacttttagcaatattactattgacatagtacaggacagaatataattctggaagacttttgttcttgtgtttccttacggaacttcatagctaaaatccacagcttggccaaatctcataaattctttatcttcagtactgaaaacgctaggcagtttacagcaataattttcacaaacttatttaaatgtgtagtctccatagattcagaactgtaagaaattaatttgtatggcgtgtattgttttcaggtttaattaaatatgctttgttaggacattctgcttattaattcattttcacaagctgtaaaatattaacaagtaagacttttccttgaaagattcctgtcctaattgctgttctaattgaaattaaataattaaaaatcaaacatattgtgaaatggtttaatgctataagtgctgttcccttactttagttacttaaaattcttaaccactctataaacacacaattttacagtgatcattattgaagtattttacctttgaaataacatctatacatatcaacttattgatgaatttgcaacatagaaaacatttcagggaattttccgcatcaacttacatctagaatgttctattcatttataatgcatataaaatcaaataatataactttctgtgtttctgaaattggatatatgataatctatggtatcaaaagcttattgatatcattatttattggaaattttaaataaagtgacactgtagtaggcattcaccattcggttatcacaatagctgaagccaaatccaaggctgaggaaatatttatggccaaacaccaagaccaaagttgaactttggcacatacaaaagaagcagcatacaaaacaaaagtacagcatgtcaccaaacattctttgaaaacttgccaggcattggccaggccatccagacattctagagaaggtgtgaattttacactttgcttgaaacaagtacacatacacacagagaggtattcttaatgttctttactcaaggtagccagcatcattactacttattttcttgtaaagccacaaaaatttgcaaataacatctgccttcttttgctaattcagtttcaagagactacaatgtcttcaaactgccatagagacttttcaatgtaatatttttatgtttttattgacagcgtttttgttttattttttcggttattaaaatccactggctcacataaactgacctatcaaaacagattcctgaatagtgcaacaccaatttgcacccatggacagatagggaaatccaaaactattagttattaggttttcagagagatggtagaaaatgtgaatctatgtgacttaaagggtcttgaatttattttggggaagatatttgtatcatgtcatttgtgtaccttgatacttttaaagttagatacccattcttggcactagcactcatctttcctaaacttaactccactttatgcccatgtatctcgcaaaatgcagcatttctattgatatcaaagcaagttctaaaccttgatgcattctgaagttgaggacagtgactgggggcactgggggcagaggggagggttcaaaagaaatctattctcttaggtttcatcataaacatattttatttcaagcactgttaatacttaaagcaaagagaggaaaattcccagagtacgctacatcttaaactatctgaaccacaaaagtaaacattcagggaatagatctatttaagtgttttgtcaataccagctttagtattgccactgggctttatggatttttaagagttagatttcttccttttctaaagaagctttggagctaaatttaagttattatcaatttgaggactagactattttttaaggtctgacttatcatttgaaaagagtttaagaattttaacttactcttttcccccaagagtactcatgtagatttttctactcctcctttcaaatcccacgcaagatatatccattgtgtcttattgccaaccagaactcttcctgtgttgctttaatcttatttcctttggcatagagcagccctcaaaaggatacgagatgaataaaaaaattcatgagtttttacaaaataaacccaggggtttgttttaaaaacaaatactaaatgttatttcaggaaagtcttgccattttagtagaatctgtaaggaaaaacatttttgacatcatgctcacatattgggttaatagcagcctatacaaacataatctttctattttctttttaagaaaaaaagagatatatgctgatatacatcatatataaatacacatatgcacaaattatgagttcttgtttaaaatcacttaacaaaaagatgaaacacaaacactgaccaaatataaatggattaaatcagagtttagaaaaatagttcccagggatttcaaagcccccaaaaaagaagtcattttaaccttatcaaaaacaaaattaacttcacactagtcaactgattttctcagcaaattggagtgaaataaatgacagaaaagtactttgaaagtgggtcagatctggaagtcttataggcagttttatcacatagctatatattttagaaactacaaaagcatttattagaaaattaaatcttaaaatggagaatttaatactcagttactagttctaatttttgcaatagccataagcaggagtttggcaactttcttcaaacagacacattattctggaactttgcatcctgtctcacactgagtctacatcataatagtaaagtatcttctcatccaaaaatgttgtcttattctgaatctcctcttctctgttcccctaacacttagtgtatacctttattatggtatttctcaacctaaacatttgatttaactctctgtttttttccactacactgctattattttgaaggcataggttatgtcttctccatttttatatagccagtgcatgacccacagcagtgtctttttgtgagccaaataaacctcttatgtatatcatttgtgttgccacagaagaataactgcagatgggtaatttatatatttttatgtatattcttattttatatatattttaatatattgtatatattacataaaatatatagtacatattacataatatattgtacatattacataatataatatattgtacatattacatactataatatattgtacatattacataacataatatattgtacatattacataatataatatattgtacatattacaaaatatatatttcacattacataatatatatttcacatattacataatatatttcatacattacataatataatatatttcatacattacataatacatatttcatacattacataatatatatttcacatattacataatatatatttcacatattacataatatatttcatacattacataatataatatatttcatgcattacataatacatatttcatacattacataatataatatatttcatgcattacataatataatatatttcatgcattaaataatatatatttcatacattacataatatactatatttcatacattacataatatactatatttcatacattacataatatatttcatacattacataatatactatatttcatatattacataatatactatatttcatatattccataatatactatatttcatatattctataatatactatatttcatatattctataatataatatatttcatatattctataatataatatatttcatatattctataatatactatattttatataatataatatactttatattttatataatatactttatatattatatactataatatactttatatattatattatataatatactttatatattatattatataatatataaaatatattatataatataatatattttatattacataacataatatattttacatattacataacatatcttacatattacataacataatatatcttacattttacataacataatatatcttacatattacataacataatatatcttacatattacataacataatatatcttacatattacataacataatatatcttacatattacataatatatcttacatattacataacataatatatcttacatattacataacataatatattttacatattacataacatattttacatattatataacatattattttacatattatataacataatatattttatatattatataacataatatattttacatattatataacataatgtattttacatattatataacataatgtattttacatattatataacataatgtattttatatattatataacataatgtattttacatattatataacataatgtattttatatattatataacataatgtattttatatattatataacataatgtattttatatattatataacataatgtattttatatattatataatataatgtattttatatattatataaacactgagggtcaaatttcaacaggagatttggagggtcaaatatccaaactacagcaccattatattcccaaagtctatgcccttccccctacaacaattatatattatatagtatatattatatagtatatataatatactatagtatatattatatagtatatataatatactatagtatatattatatagtatatataatatactatagtatatattatatagtatatataatatactatagtatatatactatagtatatataatacactatagtatatataatacactatagtatatatactatagtatatataatacactatagtatatatactatagtatatataatacactatagtatatatactatagtatatataatacactatagtatatatactatagtatatataatacactatatataatacactatattttatactatattatatataatatattttatatatatattttatatatattttatgtatataatatattttatatatattttatatatataatatattttatacataacatatattatatataatatattatatattactatatataatatattatatattactatatataatatattatatattactatatataatatattatatattactatatataatatattatatattactataatattcataattatataatcatataattataatcatgtaattatataattatataattataattatataattataatcataatcttatatagtatataatatgttatataatatataatatattatatatatcatataattatatgatatatataatatattatatatattataaatattatataattttattatatgttatatattatatcatagtatatattatataatatataatataatataatataaattatataatataaatatatgatatattatataatatatattatatattattttacatatctttatatatatacgcaaatatataaattacacatcttcaggtattcctctatggcaacacaaatgatatgatatatacatgaggtttatttggcttttggttctgtgggctgtagaagaagcatggtgtacttctggtgaaggcttcaggttgcttccaggcagaagcagaaagggagccagtatgtgcagagttcacatactaagagagggagcaagagagagagatgagagagagatgagaggaaggtgccagactctttttaataaccagctctcataggaactaatggaatgagaactcactcagttcccccagggagggcattaatctgttcatgagggatctgtccccatgactcaaatgcttcgcagttaggctccacttcaacactgagggtcaaatttcaacaggagatttggagggtcaaatatccaaactacagcaccattatattcccaaattctatgcccttccccctacaacaaacaaatattctaatggatttaacatgattttgtttgtatgtgtcgtttcaaaatgcatgttttgattgcacatacatttttagtgtgtataaattgggtttttaataaaaatcctttttattttttatggacactacgttttgaaaatacatgtatgttgatatttatatatttaatacattgctccatagtattatctaattttctaccagaaccacctggaaatatgcactctgaaagcatacggaaaccgaataagtgagaaggaaaatcaattcagtgtcacctaatctttcactataaagagtaaagtgagttatatttaatatacaatattaacgaagtacttacactacacatgcttacactacacatgctcgaagcattcacatgtttacgtttagggatattacaggattttgcttgatgtaatgtgtacgtcattacgaagtgcttacactacacatgctcagagcattcacatgtttacgtttagggatattacaggattttgcttgatatacagcatatagcctgcagtagagaaactataaaaaatccgggagaataaataataagaactagagatgggctatagagcagtaacaaggattaaaataaaaattcagttcctttttaatcactggcaaatagtaaaacttttctcgggaaacaagaaagtatcattatttaaacaagttttgtataacttcttttataaactctttaatttctttcttctttcaaaactaagtttatggagcttgaactacagtacagtcattttaacttaattttgataaggatccagcaggttggtggttattatccccattttattgataaagaaactgaggtggtaagaatgtgaaaaagtcagggagctaacgcaagggaggaattaattcaaacctaggtttggaggaacacaggctttagtcagaaatactttgttcaaatcctaaaacgctgctacttaccaattctctgacatttggcaagttacctacatcctctgtgccttggttcctaatctgtcgaatgaagttactgatgcctatttaaagaattgctgtgagtgttacagggaggacataactggcacttatttatttatttattcttactaagcccacatattccatagctgaaacaggagctgaacccatgctttagggtgttaattcactatttgttccgggagactagttacatctttaactaatcaacatacaatattcttatatgcaaagtatctgatgtctaaattacactttgtatcttggtcttattctctcttctcaatgcctattggccatagtagtcctcctctaccaccagagtaatcttccttctggccctgtgacttgatcatgttactaattttagcaggaaaatactatatttgaaacccttcacaaccggacctgtgactgcttttgaaattcatctgcttctattgcttgggctccagcttggggcagtctggtttttaatcccatcttcactttgactcatgaattcacttcctcccatatgtatctgcatctttgtttcacatatacacctttctttaaggcctgtgaagcctttttccttccccctaacataaacacagcttctttgaatctttgcacttttttttttttttgatagagtctcactctgttgtccaggctggagtgcatagagtctcactctgttgtccaggctggagtgcagtggtgcagtcacggctcactgcagccttgacctcctgggctcaagcaatcctcccacctcagcctcccatgtagctaggcctacaggcatgtgctgccacacctggctggctggctcttttctttctttctttttctttctttctttttctttcttttttctttgttttctctttcttttcttttctcttttcttttcttttctttcatagagaaggagtcccactttgttgcccaggctggtcttgaactcctgggctcaagcaatcctcctacctcagcctcccaaagtgctgggattataggcattagctaccacacccagtgaatcattgaactcagaacaaagttttcttcttcttctcctatgacatgtacatagaacttcaaattacagacatttgtattcttaactcattctccctatttaactacagcttcttgaaaacaaattttcttactcatttcttgtcacttaatgcatgcatgagaccttatgtatggttggtacttagtaaatattaaatgaacataactaaattaaaagcttgaaggttttcacttctgggttgcaagacctgtgtttcttaaactactttggccttccaggtaacttttataaaatcaaaataaattatcaagaagatgacaaagaacgattgataaataaaagagttaaactttcagaaagcagtgacagcattcattttactcacaagccaagacagctcaacaacacaattaaaagctaccgaagtaagttgggattcttggtgaaacaacattgcataatatctcacagtggctttaagtcaccacagtgcagggggtgaaagcattttccacttggaatctaaggcaacttaaaaggattattgatttttccctctacttataaatgagagtcacatattaggagtgaaagctgcagacccaacataatgacctttctacttggcttctttttcctaacataaacagaatcactttctgtggttaagaggatattaagcagtcaatcttgtaattgtgtgcgtgtgtgtgactgcctgctccttgagagcaaaaattagtagcaacatttttaattttaaaaattttggttctgttcacttagcattagaaatctcaatatctaattgtgtgttttctcttcctgctctggtgttgaaaagtcttgtgtttacttaacgcctcatcactaatacacaagttcagctgaaaacggtcactttattgaagacataagacctggcttgaccttgtttaagatgtaagatttaaaataaacttatcgtttcctgatgcgttatcataagaagaaagattctaaaatataaaatagtgggaaagcccatattaaaactgccctccaaaacaaaggctgcggggttgacaaagtcattaaaatcagattttgttttgtctgtcagatttcaatttcgtgatttaattagggattttctgaaaacaagttgaggcttggtggttttcctgctctttgttgctagttcctttctcagggatttaaaatgactgcattttctacagcttctcactcttttgagtgaactctgaattatttctgtgtttcttttaagattttctttctttcttcactattcaatgacatctagcttctattttaatgatagaaaagtaatgatcttgggcgatcatctgcaactgcttcactgtaagcaagcagaaacatttttgtgatttgaaaggtaccaggtagatcctttctctgtctgaaactgttatctctaacacacacacacacacacacacacacacacacacacacacacacactgccagttgttatgtctgaagttctcccattgaagggctcccatcagttcattctaacaaacacaagtttcacataccatgtgagagagtcatccctttagatactgaaattacaaaaataatatctgcaatttgcccagcactaattatgcatcaagcacagaactaagtcttctacttatattctctcatttcatcctcacatcatcacaatgaggtaaatattagaaccctcaatttccatatgaagaaagtgaggaccagagaagtgacttggccaaggtcacagagcctgtaagtgttaaatgagcaggtttttctgatttcagagattgagctctacctgacactgcttctgtgaataaggaagtccctgtcaagaggttgatagccagagacaaaatggaaataattcttaagagtttgaaaagagccttcaattttggcaagaatcccatttttacagataagaaaacaggttcaggggattttcaaagtttctcaggcttataaacctaatgtgtcagttaccaatttgtaatgtctcagcttcaaatctactctccattgcatggtattcaggatagaaacagaccctgggtattagttttctatagtttccataacaaagtaccacaagcagggcaacttaaccaacaggaatttattttctgttctagaggctagaagtctgagatcaaggtgttggcaggcttggtttaattgaggcctgtctccttggcttgcagatggctgtcttctccctgtgtcgttacatggtcttctctctgtacatgtctgtgtcctaatttcttcctataaggacattagtcatatcggatcagctgtcactctaacgaactcagctagcctcaattacctgtttaaagatcttatttccagacacagtgccatcctgagtactgggggttgaaacttccacatgcaaattttgggagacacaattcagcccataacactctgtaaatttttacttttgcagctgcacagtattaaactttgtcagtagaaggtgcagaagacacactggaagagaaagggtttctcatcctggttctggtatgctgcactagacaagcccctgcagcatatgcagcacagcctctgcagaaccaggctcctgtagtatgtgtggcttctgcagcacatggctccagcaacacctaccagacagcagcacatggcaattccccacggacagctgctaccagcttcctcttataaggcttttaggtaaaggatcaccagcatgggacctaccatgagcagcttctccaggcgccctcttgggtggctacacaacagaatcctgctagccagcccagcaccgcctcatccatggcttctctagggaacttccttggggcagcttcacagtgagttccaaggtacagcagctctccagagcagcttcccccagcagctcagagagtggcttctcagtaaatgctgccaacatggcacctcccggtggatgactttccctggaacttttctggaatccccttgggtgtccttgcagtcttgtgaacatctctgccatacagtgagctactgctgcactgtctccaatgaaatccagactgtctcaggatgggaaggggcatccagatttgattttttttattccttggatattgtttttcatacccagggggaagtggttgtttcccatacctactattcttctacttattattattttttttagtgtctttacttctagtcaatctcctgttagtctaataccctgttaataatttcttatattaattgtgtctttttaaaattatctttaaattaaaaaaaatctttgtgttttctatctaccaattagaccccaactaatacaaccggtaagtggcaaacccagtacccagataatcctataaaaaaaggaaaatgcataggtgttataaagattgaaaaggaaaatgtaaaactgtcattctttccagaggataaggtcatttatttagaaatgccagcagaatggagatgacgaccatagatgacagaaatacaatggaaaagaaattaacaataaaatttaaactgcagttccttacataaattaacaatgataaatagctataaacttgggattgtaattaatttgtctctctaccaaaattctaaaaagtgtagaatttaagaaaataaaagtctataggaatgaatgacatcagctagggaagagttttataagcagaagcaagagggctgatatcaacgagaaatgtagtagagatagaatagccagcaaagagactgaaaaggaaggaacaagaaaaaatgtgggcatataatgtggaatcctagtaaaaaggaatcagcagaactgtggactgtcagccaaatctgaccgtcctcccacccacacactccagccttctacccctacctgtttttggacagctcctgagctaagaatcagttttatgctaaaacagaaaagttgaatagttgcaacagagactgtttggcagccaaagtctaaaatattatcacctagcactttacaggaaaagtgtaatgaccctgctaaagaagtgtctcaaatgcttttgtgagacagagtaaaatgcggacaaaaatatgaccatttgtttgcttgaattctgtgtcctctgaaagtgaatttcacatccctaaaactcagatcagatataatctaaactttttctccttaaaattgaactttaccaactcttgaactcccattctctaaaattcaggatatactcagtctcatttcatatacttatcctacctagggataatctaaattccaggcagcttacttatccctctaaaattgaggagaaggccagcctggtctacagcaatcctccatcatctactgacctctatcaagatgcacattcctcaccaacctttgatggctggcactgacctctggtgtattgtctaccctttgatcaccaggttgatgccagtcatacactgtcttcatcataccaattatgccaggtgaagtcttccagcttactcaccattcctttttcacctctctcacttagactctaggcaactttgctgtgctttttcatgtaccatactggatgggcagaaatctgtgagagcttacccctctactgatatccttctattcaacaagcttctctgggggcgtgggttcacaccaggccaccccaagaaagcaaagcacaggtgttgttcagcccaaacttatcagaaacagagagaaagtgggtctatgatttttgaacttgcttagagacattctccaaggtctgactctgcattttctctcacaattctgaagcctttcccaattttaacaattctttcagtggaagaaaaactaattcttacaacattttattttttaattatctttaatatagcagagaaagtaatgagtgaggtgatatcatggcatatttcatatgtattaaaaattaataagggaattttattaaaaacttaatgcccataaattttacaacttagataaaatagacaatttccttaaaaggcataaattaccaaactcaataaagagaaaatagataactcagacagctgtatgtattatataaattgaaattgtatttaacagtctttcccaaaagaaaactagagatccaaatattttcactggtgaattctacctaacgtttatgaagaaaataatgccaagtccacattaactcttccaaaaaattaaagaggatgaaatactcattgtatgaagcaaggattactctgataccaaaacaaaatatattacaagaaaagaaaacaacagaccatatccctcataaaaatagctacaaatattctaaacaaaattttagcaaatcaaattttacaatacattgagatgataatacatcatgaccaagttgagtttttctcataaatgcaagtttggctttatatcttcaaaaaaaatcaatgtattaaaagacttaaaaaatgaaagccatgtgaccatctcaataaatgcaaaaaaaaagcctttgacaaattctaacacccatttctgacaaaaataaataaaactctccatatcaggaatgaaagtgaacttttctcaaaccgataaaaagcatctacaaaaaaagtggagctaacatcatatttaattgtataagttaaagtaagagcagaatgtgaattgtgttgatgtcaggttaaaaaccaatactttgtcctacaggccagagatggcctattggttttatttcaaatgccaaatctagtaaactacattgacaagaattctgagaccacattcaatctttgcaagaaatagagttttaagataagggcaatatgaagtggtacgtgcctgttatcattgctacaaacaataggaaattactgacaatataggaaccacatcaatagagaacacaatagaatctcaaacttgaagggacataaacatttaaacttgttttctatttttatttttattttttattttactttaagttctgggacacatgtgcagaacccgcaggtttgttacataggtatacatgtgccatggtggtttgctgtacctatcaacctgtcatctaggttttaaaccccatatgcattaggtatttctcctaatgctctccctccccttgtcgcccaccacctaacaggccccagtgtgtgatgttcctctcccagtgtccatgtgttctcattgttcaactcccacttatgagtgagaacatatggtgtcaaacttgcattttaaaaagaacatactgatgagggggtgcagaataactcatataagagattaaatatgaagctagtattatactcgcagtaatgaggtgcctttccaagatttaataaaaggatagactacttatgcctacaaagataagagcaaagacattatgaaccatattaaagaggccaaataattcttagactaaaactctaaaagaactcagtgagagcttggtcatagatcaagaaataatttgttaatcaaaaggaggatgacaattgttatgattattgaaagtgaatcatcaataaagaaatatcagttgatctatagcacttttcaatggaaaggatgtgctgaactataaaaggaattgtctagtactcacggccactatgactctaaggtgatatgagttcattagacttccatagctccaaaagactagtcattaaaatcatctgatcaacacctctcactctgattctattcctaccatcaactttctagttatcttttggtttgcatgtgatttacctttaaagaaagtatcctgattactgaactctgctctctggttcaattttttttgtattattaatttcaaaattagcattatattttatatatgcatttattatgacttaggtagttaagtttcagcaccctgtaaactctataagtattaactcccatgtttctaagacccctctaatcctgaattgtaatgactaaacaaagttaccactactatggaaatatatagctctgtctcactgcttacctccaaattgtaacaaacagcacaatacatatttgttttgttgtagtataaagaagggtggaatatatatataagtataataaagatcttaacactaattcccttgctatgcaccccaaacccaggtaaaagtatgttgtggaacactgtaagaataatgcaattattgtgttaaaaacaaaaaaaactatcacatacttttgaattttagaactaaattgaccattacaaaagataagaagacattgcctagaaatctgataatctaatgtgatatatttcgctcttctctcttctggtattgaacaatgaaaaaacaaactgttaccaaaaatagctaccttactcgaatataattgtccatgctgcattaatttttaattaatcttggataggcaagcattgcagtatccctctaaaaaatattaaacatttaaattatattctcccttaatcaacttattatattaagaaaagaaaacaactattttggcaacttcagccttcattggctttcttttttcttgatttccatgaagattttaagggcatgttctcattaggtcttccacatatttgcccatttttcattttttgaaattaaaaaatatatatatatgaatgatatcaggcatacttttggcacttctccattttaaagctgacaaatggagttcaagataacaaactgccaaagactgtggggaaaacagagagcaaacattgagtgtgccaagcaagttgtttgccatcagtcatattgacataatgtgcctacactgagagagacataacagcatcctgctagataattctagggaaagggggtgaaagcttaatagaacaatcagtgggttacttttttacctatttaaagaatgattacaaaatgacttcttagattggattgctgattgacatgcactcatttacagtcaagagtttttaggacaacacgtggagaaagagatatggacgtaaccacaccaggattgtgtttttatgtgacccaggagataaccttgaaacaatagaaagataacaaattgaaaactggcatatttttatataaaaaatacaatttttaccctcaagaaatttacaataagataaaaaaatttgaaatttttaatttaaggaaatctttgcacattctttttctcttatttgtcaataaatttacaaatattagctaacttaaaagagttctgagaaataagcaaaagatgaaaactatacaaagaacaaaaaaactttcttatttcctattttgaggaaaaaagtattcatctcaaaggcttagtttggtagtggtagacagtcccaatattattttggaacttgcctgatcggctggagatattacataagggtatctacatcataggatcaggaaaactcacattctttgattcattcagctagttagcccctctagtgtggagtacaagtttagggtgaacaaaaatacacatacagaaattatgtcataacatgataaaataaaatgtaataaaaataatgaatgttatatggctgaaatgcccttcatttaattccgactgattattaagatattcaacggaccagtttaaagccagacagctaaaacttctacctagatgtgtggtgcactgcaaacccatcatgctgaaaatttgattcactatatattcatctaaaaattatttttagaacatactatgttcaaggcaatgtgacttttccttctccttatttctactctcatgttcagaaaacataacatatgaaagtagaccaaagactaaatattactggctactatatacaccaagatcagtttttatcaagtatttgtacttcttcatatgtatggacattattcagcaaatacttgcacgaaataacctattagcttggccggttgcctttggttccctctataccttcttgtttcagaaacttcccatctcagtatggtacaatatccacaggtccctgtttgtggaatctctacagtggctctccatcagtttcagggtttttactggctttagtaaaatcaaaggcatataactatcattcttggaaagtttagaattttgtttctatcataaaatgttttcatatgattgatgatatgccagaaatatcactgctttacaatacatacctctagaaatagtgaggggatttcaaaattttggtttataccccaaaaagacagtaagaataaaagatgtgttaactgatgaattcagtgaataatctctaaatggaattctctcattcttttcttactactatacccccttttataatttcctgtctctgaacaagcatgtgcatgtgtattcacatgtgcacacacagagaaagttacatgaatccctttttttcttactagaacctgaaatggtttcctctacttaaggtctatgatacttgacactattaaacgatgggctctttttctattttagttttcttttactttacttgctatgtaacaataaatatttgcaccctactgaccaagattttaaaaaaaagagggaaaggaaaataaaatgttagctctgtttgtggtattcacttaatctttttcaaaatgaattccatagtattgaaagataagaaaaaattatcttacttggcaaggccaaatttattataaagtatatttgttcattttgcaagtcagtttttgctaaaataagaaatttataatcctcagaaatctatgaacacagatcataatattggcaaaaataattttctaaaaatatttggtatgtttataactgatatgctgtcttttggaaattacttaagcatcagataacataaaaattgtttttatccctctctaataacagtatttctaacttgtaactacttatagaagacatgatggcactagtaaaagagtaaagtatcaaataggaatattatattatttagggtaaggtaaggtaaagtaataaataaaatcaaaatttcagcagtttaatacaattgaagtttatttctcagtcataagtgtgtgctcctggttggtggagactcttcctcatgctataatttagggacccaaactttttctaaactgtgactctgctctgtcctaaaggcttcaacattattacctggctctaggtgtatgagacaggtaccattgcttcttaaaagtcgtacctagaacttgaaaacatcacttcctctcacattccagaattatttacagggtcatacctagcttcaagggaaactaggagataaaattccaccgggaacagccatcacgctaaaccatgaaaacgtgcataacttttggtagacaaacctttaaccccattatgttcagataagcccaaagtattcaaccaagaaatacgatttttgaataaatcacaaaaaatttagaagtcataaaatcttttggaaaacatgtgttaatacatctctgtggcatacttgttttatttcttatatttcttaaattgcttaaaattactgttttgctcaccaagggcatcaatttattcattttactactgaccaaacaaaaatattgcataaatgtataataatgcaacaatgtaaccctgattcatttagtttcctaatcataatttcaagaacatatctacagacagcaaatacatacctacatttgtttcctggctctttttaatatgaaattccaatagatgtctatgatcctgaccatgtgaacactgacattaaaaaccaagatggaatacccataaatttttcacatttgtctactacttataaacaggcaattctggttgcctgtgtttgtgggttattgctcaagaaatgttttcccagaccaatatcctgtagattttccccgatgttttcttgtggcagtttcatagtttgaggtcttagatttaagtctttaatctagtttgacttgacttttgtgtacggtgagagataggggtccagtttcattcttcggcatatggatatccagtttttccagcacaatttatttaagagactctcctttccctagtgtatgttcttggcaccatgtcaaaagtgagttcactataggtgtgtggatttatttctgggttctctgttctgttccattggtctacgtgtctgtttttatgccaataccatgctgttttgtttaccacaactctgtagcaagatctgaagtcgagtaatgtgattgctccagttttgttctttttgtttaaaatagctttggctattctgagtctttcgtggtgctatataaattatatgatcttttttctaattctttgaagaataatattagtattttgggatagggattgcattgaatctgtacattgctttgggtagtatagacactttaacaatattgagtcttccaataaatgaacatggaatatttttccattgctttcattagtcttttatagttttcattatagcgatctttccattctttgggtaatttttaggtatttattttatgcatggctattatagatgtcattactttttaatttctttttcacattattcactgtaggcatatagaaatgctactgagttttgcatgttgattttgtatcctgcaacttcactgactttgtttatcagttctaacagttttcttataatctttaggttttcctaattataagatcatatcatgagcaaacaaggttaatttgacttctttccttccaatttggatgccctttatatccttctcttgtctgattgctctagccagtaattccagtagtatgttgaataacggtggtgaaagtggacctccttgtcattttccagatctcagaggaaaagctttcagttttttttcccatttagtatgataatacctgtgggtctgttgtatgtggttcttaaatgtattgaggtatcttccttctattcccagttttttgagggttattatcatgaaggaatgttgaattttatcaaatgccttttcagaaacaatggaaatcataaggtttttggccttcattctgttgatatgatgtatcatgttgattgatttgcatatgttgaagcatccttgcatcccagggataaatcctagttggtcaggataaatgccctttataatgtcttgtggaatgcagtttgctagtattttgttgaggattcttgcatcaatattcatcacagatactggcctgcggttttctttttttgatgtgtctttggttttggtatcagggtaacactggcctcatagaataagtttgaaagtattctctcatcctctattttttggaatagtttgagtaggattggtattagttcttctttaagtgtttggtagaatttgacagtgaggccatcaggttctttactgggagactttctatgacagcttcgatctcattacttgttatccgtattttcatgttttggatttcttcctggttcaatcttggtaggttgtatgtacctagaaatgtttttatttcttttagattttccaatctattggcatatagttgcatgtagtaccccttaatgagcctttgagttctgcattatcagctgtctccttcttcatttctgattttatttatgtggatctcctcttttttttcttagttattctggctaaaagtttgtaattttgtgtaatgttttttaaaaaaaacaactttttgtttcattgaccttttgtattttttatttcaatttcatttatttctgctctgatccttattatttattttcttctactaattttgggtttggtctgctcttgcttttctagttctttaggatgcaatgttagattgttcatttgaagtttttcttatagctataaatttccctcttagtactgattttactgtatctcataggtttttgtatgttgtgtttacattatcatttgtttcaagaaatttttcaatttccttctaatttcttcatcaacccactggccactcaagagcctattgtttgatttccatgtgtttctatagtttccaaaatccctctttgtattactttctaattttatttaattgtggttagagaagatgcttgacattatttcaaatgttttaatgttttaagatgtgttttgtgacctaacatatggtctattctggagaatgattcatgtgctgaggaaaaaagtgtgtactctgtagctcttggataaaatgttctttaaatatctattggatgcatttggtctacagtgcagattaatgtttctttgttgattttctgtctagaaaatctgtccaacgctggaagtgaggtgttgaagtctccagctattactttattggggcctgcctatctctttagctctaataatatttcctttctatatattgatggtctagcattgggtgcatatatatttaaaattgttatatccttttgctgaattcatttctttattattatatagtgaccttctttgactcttcttatagtttttgtcttgaagtctattttgtctgatataagtacagctactgctacttttctctggcttttgctggcatggaatatcttttttcatccctttattttcattctatgtgtgtctttataggtgaagtatgtttcttgtaggcaacagactgattgattttttttcatccatgcagccatcttatgtcttttgattggagagtttagtccatttacatttaaagtcgttattgataagtaagagcttactcctgccattttgttatttattttttctcttttttagttgccttctcttccttctttctttccttcttgtcttcctttagtgtagatggtttgatttagtttctttcttttcattttttgtgtctctattctatgttttttggtttaaggttgccatgaggtttgcaaatactgccttgtggcccattattttaacccaataacaacctaacactacataaacaaacaaacaaaaagaaaattaataaaaactctacatcttaactttgtccccctactttttaactttttgttatttctacttatatcttattatactgcctgtgccttgaaaagttgttgtagtaattatttattattagttcattgtttattctttttacttaggataagagtagcttacacaccacagttacagcattatcatattctgtgttgttctgtgtacttactattaccaatgagttttccacctttagatgatttcttattgctcattaatgttaaacaagtaatttcaatatctctatttgatctgcaataattcacccaaactccagattaatttccagctgattagttcaatttttagcacagacacagtttactcaaaattaacacatccaaatcaaactggatcttctcactctatacataaaacctgatggtcttcaaatattttgaatgatgcactcattcattaatcaaataaaattatgcatggagctcatgtgagaagtgtcaactctttgtcaatatactctaaaagagggtcattttggtaaaacagacacacacaataaccaataaaaagcaatgctgctacctatcctaatgaaaatagccctgcatgcatgattgttaaacagtcaaaaaaagggaccaaacattgaaagagattcaacaggtaggaagagatgaaaaatgaataaatcaaacagattttaaataaaaatgcaataattcaaaaagagaagatcattttatttcaaatccatgattgtgtcaagtaaagagaatgctgacttcataaaaagagattgctagagacataacagaataagaaatcaaagagttcatagaaactattaataaaaaattaatttccattaaatcaccaaatgagtatttctgagtctaaagtcctatcttaggatttccagatacaatacaggacacccatctagattggaacttcagatgcctaatgattactttttttagtctaagtatgacccaaatattgcatgaaacatgcctatgtaaaggtaatttattgacaaggaaggggcaaagtaatctgttgcttctctgaaattcacatttgactgggtgccctgtatttgtatttgctaaatatgacagccttaagtattatgcagttagtgagtggagattagataatacacaaagaagagcataaagaaactataaactaagtttgtattagttttctcttaaaaaatataatttccagttaaaatgaaaatcactaaatacaaaaaaaaattgcatgactaaagacttaagtaggagtctaaaagacagagtctagaaattctcttataaattagatcaaaaaagataaagaggaaaagcatgagggaaaattcataggctatataaagattagattcaaaaagctaacatctatcccttaagagttctggagggaaaaacaaggacaatggagaggaggagagagttttcagagtaccatggtttaattttacgtaatgaaaagttaatagaaattttctaaaattggaattcctaataaaaatattttaaggtgagatagaaaaccaaaaatgaatttgtaataacataattgtcgaggtggcagagaaaacagaagagaagaagaaaaaatatgctaaaatcattattttcaaatggaggagaataacattactcaagatagatgtatttattatttagacctgtagtgatatatttagtccagatttctcaaaacaaagcttcaggttaaggcttgaatgcaggtagtttatttgggaagtaaattcactaatcaggaatgaaaaaattagtgagtgagacagggaaggaagaaaagcaaatataagaacaggttgttgacttggctaccataacaggtgactaaaactcaattctaatgtattttctgaggagcattaggaaaattattttgcattaatctcccaggaaatgaaagaggaaaaacttagctatacattttatgccccgttggttaaagccaataatgtgttctatctgatgtcaacacaatcaaaactgtgatcagaagcaaaggacttaacagaaacctgaggcaagtgaatctgtatagttgtcttttccatgtgaaagcaagttgcatttaatcatctgtattgattggcattaagaagattacattcaccaaatcaatagacatatctgaagtgcttaaagttgtgtctatattttctagtctgccaaggctagacattcattatttctcagctacacttaataattagatgctgggcctcatttttataacagaaagtctggaaatgtagcagataagaatctccttagaagctgccacagagcccctctggttttaacagtatgccttaaattgatcattagctaaaaacaaactagtccttttcttttttcagtgcatcataacagtttacaatagccggacaactccactattcctaaaactgctatttttttccttccattcaagggcaacaatttctgcataacccaacattttcccttcccccattccttcattcaaattcatcacaagtgtctgatgtttaattttatgtgccagcttggctgggccaagatgctcagatatatgatcaaacattattctggatgtttccatcagggtgtttttgaatgagattaacatttaaatcagtggactttgagtaaagtaggttgccttctctgatggcgggggtgggggcggggggtggagtttcatccaatcagtgaactcctgtatagaacaaaagactgcccttcattgacaataaggaattctaccactagaggccttcgaacttgaactgcaacattgactcttcctgggttgtctctagtctaccagcccatcctgtagattttggacttaccagcttctataatcatatcagccaattcttataattacaatatataataaattgtataaatctatatatgtatatatacatatatataaaagaaggactatgtgtttgtgtatgtgtgtacatatatacatttattatatacatatacatgtattacatatcttatatacatctatatgtacatatcaatattttactccacttatttaatatgcattttttatcaaagtcttctttgtaattcctattatctcaactttcagaatttccttttctagcattcagcatgttggtagtaatagattagaactttgatcatattcacataatctaaaattcatttactttaaaatctttagaatcttattgtattttataaatatttttcaatagtcaaaaagcagcattgaaatctcaacaaagattccaccatcccagtgggaataaatctctattttacaagctatagctatctgagtcaaagtaattttctatattatgtcccgttataagtaattacattatttttacactgttcatccaatattagagaaaatacttgaactctgctgcctgaacattactctaggcacgatacaagagaaaatgtaatcataatatcgacagctctgtttaaactcccttcaaagaagtttggatcagtctcacactgtgtctgaaagcagatatttataaattgctttgaattatatgacacctttcttctcccaaggagcttattcttatagtatttattctgtggcatttcaaataattgatttgtttcagtgtgcatgtccagaggccccaaggacatggccatgtttttcacagatctaataactaaaattaacttggggcaaaaaccaatgaagggaagctaatgcaatcaagtgggaggcacgaagactccgcgtgttgtgtgttgttcatctcatggaatattctttgtgtgtgctgaaagatattgaagatatataagatactgaattttctgtttctatttctgaccctctgctgactcagtaactgactgtggacaaggagacactaaatattttgcagctgcaccacatttacttagcagaaattatgttattggtgagctgtgttctaacagcattatctgccagacattatactgactaatgacatcatattataaataaattaaaattcctcagatgatgagaacttccaaacatagcttatatctttttttactgaataaaacagaactcccactgcagctccactcagagcccaacctagtgttacttgacccatgaaaattccttgaagtctctaataaacgtttgcctcaagagaatttagcaatattgcctgagttgcacagtgatcaaagatcttatctaatataacaacagaaattgaaacagaagacgacaaagatgatgctaaaaacccaatattcaataggtagcattttataagacattaacactgttccttgaacttacaatataactattttctattatctgcccagaatataactataatgtgtgaagttgtatttagttaaattaggttggtatgaaatgctgtaatctaaaaaaaaagcaagaatataagtcactgttgatgttgtttcagtctgaatctagagttaatttctactttccataaggtatttgttttgtcttgtttggtttggttttaaatagatgtcaaatgcctatgaatttcctaggagtatatttctcaacattattatatgctcaagctgtcagtatgtcagacatagagaagaaaggagtaaggagtatgatacacatctgtacatttattttgtataaattaatgacaatcccacttgaaatccaattaatatattaataatgaatgcaatctagatatcttggtaaaatctcaacaagaataaaaacagatttaaattttaaaaaattgttgttttttgtgtgtatgtgtttttaacatagcccattttccatttctttttccattagttaatagttccatggggctttcccctgggccaatagctgggctttgatctcacatttctagcaaatctctgccagtggaggcaatagtgttgcctgccagttcaattcagttcttacctctttttctaattgttctgatgtcctcagaatcccatgtgccaaaataaacccttgtctgtctgtttcacagctctatgtgcctgagctggtttccacaaacacagaaacatctcctgcactaatgatcttctacacaagtataggtatgaaaagagctgtatatgggattctcttcagaaaagtattcctctgttcagttatgaaggtaaagattgggttcaacttttcaagttattctatgttatgaaaacttttgttttctttaataaccttgatattagcctttcatcttaatacatatagagttaatgattatggattttaaggaggaatagctgtcttacttctgtatttttcttcagtgatgttctattgcacagatgtagacactatgcagatatttggatttaactttggttactgtctcttcaaacaggtaacacacaacaagacttaaaggtatcgtatgcatacacaatagcattcaaaataatgaatctcttgacactttctaaatgtttagcccacctaaggcacatctctcaatatgtctatagtaagaatacaattaagaagtaatctgtttttgcttctgcctccagccatgaaggagtaatagggctaagatttaccctcccattttaaacaacaaacaactaaaaaataaagtaaaatataatcaatggttttcagatattagacaatgggtagtacagaagaataacctctgagaaaaggaaaaaaaataaagtgagccctacaattgtcccatcttgctaactacaaatgtttccaggctagagcacaggaagaagaaatgcatagagagcctatgatattgctgaattgagaagacaagtacagagttcagagatgccaaggcatctagaattcacaggcagcatactggaaagaggcaactacctaagaaagaacctcagaggtctgcaaagggctccccttggggcttcgtcatgagcatgagcatgattagcacatgcagtgtgaaaagctccctatttcatggggcattgaatagagtcctcagaagggcattgcttcaagcacacctagaaaggattggcttcttttcaagcaacttactgttttacagaataaagttcaaaactactaaaaagaatgcaaatactctagaatgtcacatataaaatttcaattaaaaaataggcataagacaaaaacgggaaaaatcaatcagtaccaacagacacaggaatgacagacatgacagaaataatagacatgaaaattaaagcagtcattataaataggctcattatgtccaggaaaataaatgaaaacaatcataataaggagagacatgggggaaaaaagatcaaaatcaaatttccaaataagaaaaataaaacaaaagacacattcttttagaatactcttctaacattcaccaaaacagagcatattatgactcatgaagcatatctcaataaatgtaaaagattttaaaacatgcaaaatatgttatctagccagaattaaattaaaaattaataacaaaatatataaatttcataaatatattgaaatgaaacaacctaactgtaaataattgatgggtcatagaagaaatcacaaaagagattagaaaatatgtgaaaaaggagattagaaaatatatgaactaaactaaaatgaaagcatattatgccaaaattttggggatgcaactaaagcagttcttagagaaatgtttataattttacaggtgcatataagaaaagcagaagggtctacaatctatgtactaagcttccacaatgagtaattagaaaaagaagagcaaattatattaaaaataagcagaagaaaattacacaaatcgatgaaatagtaaagttatataaatctgtatcactttgtatacataaaactatctacacacacatgcacacacacacacacatatatgtatagagagagagatagagagagagagaaacagacatagaaaatcaactaaaagaaaagtggcttatttgagatcaataaaatggataaacttctagacagaataaaaggagagaagatgtatattaccagtatcagaaatgagagaagaaaactcactacagaggctacaaacattaaaggaatattataaataattgcatgccaatcatttcaacaacttagatgaaatgaactttaaaaaataaactaacaaaactcattcctgaaaaactagataacataaatagccctttatcgctctaaaaattggatttgtaccacaactgtcacagtaattaaaatctagggtatataagacttcattggtgaattctaacaacatttaaggaaaaatagtacaagcttttatttcagctcattctgatgagctatatacaatgacactcatgaacacagatctaaaattgtcaacctaattttagaaaatgaaatttaacaatattaaaaagactaatacatcatgactaagtgggatttatctcagaaataagttttgtttagcactggaaaatcaaatagcataattcaccataacacagactcaaactgaaagaaaagatattctcaatagaagtggaaaagcattttacaaaatttaatatcaactcatgactttaaaactcagtgaatacaaattgaaattgtggtaggttgaataattgactcctaatcactgaaagctgtgagtgttaccttatatggtaagagggactctgcaggtatgattaaatcttcatatgaggtaatcatcctggattatctatgtgggtcctaaaacagccacaggcattcttataaaagggagacgggggagattctagtcagaagaaagggatatgatgacctctgcatgagcgtttgagcatggaaggaccaatccagagccagggaatacaaggaatgcagctctagaagctggaaaaggcaagaaaatagattctctccctagagcttctggagggcacatgaccctggtgacaccttggttttgtcccagtatatctgagttcagatctctagcttccagaagtgcaagaaaataattttgagttgtgctaacacaccaactttgtggtaatttgttaaagctgttgcaggaaactagtatggaagacaactttctcagcccaataaatggcatctaagaacagtcaatagctaacatcatgcttaatgataaaaactgaatgctttttccttaagattgaaaaccagaattggaagcaagtatgtccactcttactactatgcaacattatgctgtagatgctagtaaattcaataaagaaaaatgtaaataaaaagtataataataaaaaaagcagatttaggtagaaaattttttatttttttaaaaagctagtaaaactaatgaatgagtttagcaaaatcacttgactcaatttcaatactacaaaactaaatatagtggcaaaaaagcccagaaaatgaaatagaaaaaaaacccaataccatttacaaaaacataaaaatattaaatacgtaagactgaaatttgacaaaacttgtggaaggtttctacactgaaatctacaaaatattatcctcaaaataaaggaagccttaaataaatggagaaatgtagcacagccagtaatcagaagatccaatattgttaaaatgttaaattctttccaggttgaccaaggtcaaaggttggcaaactttttctgtgaggaaccagatagtaaatattttaggctttgcaagctatgtatcgtctctattatacattctttgttttttgcttaggtttgttttttgcaaccacttaaaagtgtaattatagctatttttagcttgaaagcactacaagaacagactctggggtgaatttgacacatggactgtacattactgactcctgctgtagattcaatgaatcccagtgaaaatcccaacaggcctttattatgaaattatatggaaatacgaaagtgctaaaatagctaaagattgaaaatcaaaaacaaagttgaaagacttatactttctgacttgaagacttatttttcaacccccaattaatcaagttagtgttagattcatatcaagttatataaacatatacagatcagtggaactggaaagaaagttaaaaaaaaatgcacatatggtaaatttattttgacaaagagaccaagcaattccacaaaaaggatactctttcaaccaataactctggaacaattgtatgtccagttaggggtaaaagagaaaacatcaatcatcccttacttcagaaacataatttacaagtaaatctgtgattaggcaaagatttctaaagagaacatgaagattatgactctattagtccattttcacactgtggataaaaacatacctgaggctgggcaatttacaaaagaaagaggtttaatgtacttacagtttcacatggctgggggggcctaacaatcatggcggaagacaaggaggagcaagtcacatcttacgtggagggcggcaggcagagaaaaagcttgtgcaaagaaactctgcctcataaagccgtctgatctcatgagacttattcactatcatgagaatagcaagggaaagacctgccccctgtgggtcaattacctctcaatgggtccctcccacaacatgtgtgacttcaagatgagatttgggtggggacacagccaaaccatatcaatggcctattgaaaatatcaatagtgttggattttataaaaaggtaaaacctttgttttttgtaggacattattaaggaaatggaaggacaaaccacaaacagggaaaatatattttaaggaacttccagctagaacaggaatcagccaaccaaggcatggggcaaacctggtctgccatttttgaaagtaaagttatgttcatttatttatgtcttgtatgtagctcttttcatgacagaaggccagagttgaatagctgcaacagaaatcatatggcccataaagcctaaaatattcactgtttgatcctttacagacacggtataccaacccctgagctggaataaatataaagaacttgtgtggctcaacaataaataacccaattttcataaatgggcaaagatttgaacagacacttcacaaatgaagatatatgaatggccaatcaacatatgaaaagcttttcaaaatcattagtcattagggaaatgcaaattaacaacacaatagacagcactttaaacccattaaaatggctaaaattaaagactgttcataccaactgaaaaatgggaggagaagccaccagaattcacaaatattactggtgggaatgtgaaaaaaaaaattgtaaatcacttttgaaaattatttgataatgtctttaaaagctaaatgtacaccttctatacaactcagtcactctaaacctaggtcaacctaggtatttacctagaaaaatacaagaatatgccaatacaaaggcatgttcacgaatgcttatcacagcttagtatgttatagcccaaaactagtaactgtacaaacatctatttgcaactgaatgtatacacatactgtggtatgtctagtcaatataatagtactcagtaataaaaagagtgatagaagcaactgaataataaggcaaacaacctgattttcaaagtaatgggcaaatgaatgaatcttaaaataattatgcttaatgaaagaagtaaaaggggctacatagtaaaagagtacatattatatgattctagaaaacatgaaataatctaaaataacagaaagcagattagtggattcatggaaatgggggtaggtagaataagggataaattacaaaggggaatgaagaaatctttgagattgatagaaatgtttattatccttattgtcataatgatttcatagttgtatacatatgtcaaaactaatcaaattgtgcgctttaaaatgttaccttcttgtgcatcaatttcacctcaataaagctatgcaaaaacagaaacttttcttagacaaaatttttataactgcaatttccccaacataaatattactcttggagtgttacttgtgaaggaaaaaataattatagtgacattcagcctagctactcagattgttgtctgagaagagacagctttgacattgactgagagctttcagaaatactgaatcttttcactaaccataccaccaccccagagcttttgattagattatgcatttttttaaaaggtctctaggtgatttacatgtactttaaaatttgagacgtactgctctacaaacaagagctctggctcaaatgaaaggtaaaaatcaatacaaaaatttctcatcagagatgttatttacaagattcaggtatcatatcctgggtgttactagataattctacaatgttctttgattctgattccacagtcccatgtcactgcccttttcttactagacctgcccccatttttcatgtgtcatttttccccacctcttctgatctccccatacttaagcataagtgttcattttttcatagataatgttaggtggttgcaatcactttaaaatcatattggcctcccttgcctccatttctatctatgatttctttatattgtggtaaagtcaacagggggtggtttcggagagttactcacctgatctgaatcaaagtctctaaaattaattccagaaattattaacaaaaataaatgaagagaaaaaactgaatgatgtaaaccactatgcatttaattcttctttaataaattttcaatgaaatctaagtacaattgaaaaaaataagctaaaaataaagagtcgaagagaagagcataacacaaagcaagtgcattgagtaaagggcaaactctgaggaaaatattatctattttaaactttaggttttactacataggttttactatgttctcacacgtattacatttttttaaataaatttgtgagataagaagtcaaatatcatcattttctagatggctatgcaatttgtccactctcagctgggattcaaatccaattgtttcaacattcagcctagtgttctctgcacagcccatattacacgtatgaaatgtccttgaaaacaacactgtgaagatctctttcaagtttcacacgtaagtgtttgagttaaaaactaaaacaatgccttgaagcgtttgttcttaggatgagtcaaaatttgaaagagtttgatgctaaaaccaaaattgcttttgaattataaaagcatgtaaatacaaatttatctccaagacttatattgtctttttacctaaaaggaaattgcaggcttacgtttcatttggtaaaatataaaacttgaagatatttttatgtgaatagttttttttaattaatcaagttgttaattctagtgtttctagtgtttttgctgaaaagtagagttccagataccatatattttaaaaggtactgtttgcagatttctttctagtaaccaaagaaatatttccccctttaggcaaatgtactgtatttgtcctaccttttatcatgggggtcagccatcatttgtatccttttttctttccttaagtgaccatttctttgatttcttattaaaaaggcttggtagaaatagacagaaatgacacctagaaaagaatatttctgcacctgaaagtcataaactttccaatttaaacttggaaaagtatctgaagcaagccaaaatgagcacagagcaagtccaatgacaaatgcttcattcttttttttctctcgatttttttttctttttcgcaggggttgggggttaattgttttgttttactttacatttggtcagctggcacactgcacagaaacttgagatttttttcccctttctcatttcggttgcttttagccatgtcttaaattagcttttctttaagtcttgaagggagttggcttccactccccaaatggaacaatagttcctcctgagtgagagtgccagctacatatattatctgtcctattcccagcaggaacattccagtgactgcttataaaaattagtcacatggattttcagtttggggaaggggtggctagccttagttgtcatctttagtttgtgagagaattgagctgtttttctcctttcaagtcttccatttacccattttagactcttgtagatgctttagcttttcttcatgcagtcaagaatgagcccatcttcggaaggctccaagaactggggacacatttagcctgttaatgctgcttagttggcccaattccactttggttaattacattctgttccacaaacatatctctttgcattttcatttggtgatgaaaaaagattgcttttcaatctcctcttctgagctcaatcctcaaaggcccagcatggatccatccaaagttgcctaaggaaaaattccccaagtgtgggagaatccaaaagaacacagccattctcagccctcctcacacccacaccaaaatcagtattgacagaaaaatgtatgattatctgactgcagaagtttgtcctttgctttaaaagaggtatttatttaccaaggggcagtgatgacatacttgaggatccataccaaataccattcaagagagtcaggaattccttggaaacacattgtctgtttctctttaggaaaatgaaaagcactgcaaagaaattctaaaaatcaaattcctgtagtttctaacctcttctttgatgctacgtgttctatgctccaaatgtagctagtatacaagagacagtaatgaaatagatgcatcttaccatgatgtcttttttttttatttttttgctacaatgtttatagcaagggctcttcacttttatttcaattgcatgaaacaatgtgacacttgcctttcttattttagcttcagaagtttctaaaacacttgtctctgcaagattatcttgatcttaaggtgcaggaaatttgctttaaggctctgctgactcaacatttacacatttttcttctgatgaagtattttgtttcctttaaaaccaaatgatatcatgtaactcaaacaatgtagaactatactaattatgatctaaaatgacagatgtagatggagtcatactttatgtctgttcttgtagtatatatagtcattatccatcaagtattcacatgtacgctgggaattttcataccaactgccaaaacttcaaactaaccacttaaaaaaaagttcgacttcaaaaggtttacagttttaatttggacagcactgccaggaagtgatccgtgaacaaattcattttgctagtctttgtaactacaaagttctcatgattaagctttttactttctctttctctttttttttttttctttctttctttttttttggtgtagcttaactttatgattcatgggctaaaatacaattctgagagatttactgttggtgtcatactttcacattttctattacaagtttcatatgaatgtaaaattgtattagtttctgtgttataaatagccttaaaaggggattaatcatcatagaaccaaattgtttttcccagatatcagtcatgataaagtcaggaaatatagttttaggtaaaaaagaagaagagaaaacactctgaaatttctaaatttttggttaacactaagctttctcatacagaaaaatcacaaatttgccccctccccccaaaaaatcatactcagttcaatgagatggcagaacagtgatattttcacttggaaaaaaaggaagagaatttattcattaaaaaatcactaggctgggcacggtggctcatgcatgtaatcccagcactttgggaggctgtcaagagcggatcacaaggtcaggagtttgagaccagcctggccaatatggtggaaccctgtctcttctaaaaatacaaaaattagccaggtgtggtggcatgcacctgtagtcccagcttcttgggaggctgaggcagaagaatctcttgaacccaggagtcagagggttgcagtgagccaaggtcatgccactgcactccagcctgggcaacagagtgagattctgttctcaaaaaaaaaaaaaaagaaaagatattaaaaatcactaattaaatgtgaatcatataactgctcctagaagaaaatagcctaataaagaatggtattttaaaaattacgtggttttgcctgtttactaaaacatgtatcttgtctttggaagctctgaaattcacatctcagggaaaaaaggaaccccggaaagtgtattcctagaaaggcatccatagtgaacaatgagctcattttcatttaaggataaaaaatgtagatatttttatttaaaaatgtgagaatttttcagaaaatatagctaaaataaaaatatacttgaagaatatggataaagtccatgtcataaaaattggatttagatgatcctaatatttgaagaaagtataaagttaagcaaagaactaattactccaagaagttgaaaatactctgtgctctggatgggtgtatattactgcgttaaatatacattacaagcaataggaagaatttcagaaatactaatcttagtatttagttgtggtcctgacccttttacatcttacaagtataaattatcttattgtactttgcagatactgcatttttttacaaattgaaagtgtgtggcaaccctgtgtcaagcaagtctatcggtgtcatttttccaacagcatgtgctcattttgcatctctgtgtcacattttcttaattctcataatatttgaaagctttttgtattttttctccctgttatggtgatctgtaatcagtgatctttgatgttactattgtaattgttttgagggagccacatccacacctctacaagatgataaacttaaacaataatgtcgtgtgtgttctaactgacttcctctctgatcagtcattcctccatctctctccctctccatgggcctccctatttcctgagacacaacaatattgaaattaaaccaattaataacccctcaatggcttctagttgttcaagtgaaagaaaagtcacgtctcccactttacatcgaaagctagaaatgattagtcttagtgagaaagacatgttgaaagccaagacaggtagaaggctaggccttcttaaattgaaaagcaacttcagcaaagtctcaggatacaaaattaatatgtgaaaatcactacccttcctatacaccaacaacaggcaagcagagagccaaatcatgaatgaactcccattcataattgccgcaaaaataataaaatatctaggaataaagctaactagggagatgaaaaatctctacagggagaacctcaaaccactgttcaaagaaatcagagatgactcaaacaaatggaaaaacatttcatgttcatggatagggagaatcaacatcatgaaaatggccatactgcccaaagcaatttatatattcaatgctattcctgttaaactaccaatgacattcattacagaactagagaaaactcttttaaaattcatatggaaccaaaaaagagcctgaaaagccaaggtaatcctaagcaaaaagaacaaagctggaggcatcacactacctgacttcaaactacactaaagggatacagtaaccaaaacaccatgctactggtacaaaaacagacacataaaccaatagaaaagaagagagaaccaggaaataaggctgcatgcctacaactatctgatctttgataaacctgacaaagacaagcactggggaaagaattcctattaaataaatggtgctgggatcactggctagccatatgcagaggagggaaattggaccccttccttacaccatatacaaaaattacctcaagatggattaaagacttacatgtaaaactcaaaactataaaatatcctggaagacaatctacccaataccattcaggacataggcacaggcaaagatttaatgacaaagacaccaaaagcaattgcaacaaaagcaaaaattgacaaatgggatctaattaaagtacggagcatttgcacagcaaaactatcaacagagtaaacagacaacctacagaatatgagaaaatttttgcaaactatgcatctgacaatggtctaatactcagcatctataaggaatttaaacagatttccaagaaataaacaaacaaaaccattaaaaagtgggtgaaaatatatgaacagacacttctcaaaagaagacatacctgcagacaacagtcagatgaaaaaaatctcaacatcactgatcattagagaaatgcaaattaaaaccacaatgagataccagctcacacctgtcagaatggctattactattataaaaagtcaaaaaataatagatgctggtaaggttgtggagaaaaaggaacacttatactctgctggtggaagtgtaaattagttcaaccattgtagaagacagtgtggtgattcctcaaagacctaaagctggaaataccattcaacccaacaatcccattactggatatatatccaaaggaatagaaatctttttattataaagacacatgcatgtgtatgttcattgcagcactattcactatagcaaagacatggaatcaacctaaatacccaccaatgataggctggataaagaaaatgtggtacttatataccatgaaatactatgcagccataaaaaataataagatcgtgtcttttacagggatgtggatggagctggaggccactatctttagcaaactaacacaggaatagaaaaccaaatacagcatgttttcacttataagtgtgggctaaattatgagaatacatggacacatagagggaaacaatacacattggggcctatcaaagagcagaggttaggaggaggtagaggatcgggaaaaataagtaatggatactagacttaatacgtgggtgatgaaataatctgtgcgataaactcccgtgacacacatttgcctatataacaaaactgcacttcctgcacatgtacccatgaaattaaaataaaatttaaaataaataaataaaatgaaaagaaacaaaaataaggaaaaattatggaaaagaaatccctagtttgacctggaatagcttagtatttttctttatagaaatctgatggttatctataggacgaaattctaatggtagatggaaacactgaagaacagtaagtggtgcaacacatagaaatttgacacgggaaagaacagaagttccataacgattgtagattcaccacaatctgttatttccctctcttcaccattagtccttaggtcacctttttggacttggaagagtcccagatacctcacagatatactttcatttataatcttgatttttattcaaattataaaatatcaagactcttacagtagccctagcctatattttcaagtttctaagaacaaataaaatgagagccagatttctgtttctaatataaaatgccaacttctctccgagggaccagagtctattggtccttaacattttctcttactttcacaaattttctcttactttaaatattttactttcactttacttttttctcctacttccacttactttccacacttcaatgaatcaaactaaaggtaataaaatgaatatctagtaaggctaaagctatatgggatccttaatttaaagaataattttcttaattattttaccaagagttacatgacaaacttaaaaatggcattattttgacagtagcaacaactcaaaagacaaaagaaaatattataatgccaataccctctgctactatggcagtgcagaaatttagaatttaaaaatgccaaactactttaacaatatgaaagtcattttattcataatttcactgattcactcaattttaactatattatttggctgatttaataaaataacaaatgaaaattttaaaaacagtgccatttgagagttacctgtcatgagtgatgaaattactccaaattctaacaatacatatagcaaatggcatatttgcatgggtattggcctgagtattttggcttgcatttcaacatttgtaatagctgcagcaaaaattttcctgtctaaaatttttttaaaggcagaatatcttcctaaatgagcagaagtttgggtatttggacactccccgaaagcagaacacagacaagtgttcaaatgcaaactttgtcatttttacgtcattgatttttaatatacacgtctattcagctttttcttaattagggatttgggtataactatgctctttaggactttctctgtctacctgcttggcataatatcctgggaccaattgtgaaaaaaatctgtgatggagcattgataaagaaatccctggatgttcagaaacaatttggttgtttctggcttataaaactcaagaactactttaatgagaagtagagggtagaaagtgtggagagcttgtatatgtaccaaaattgtggatagacaaaccaaaaaattgacattttaggcaaagtgacattttggatgaatatataaacaagagagttaaagtcatatttaaatgagaagctgaagcagaaaaaaaaaatcaaaacaaaaaaatgaattaaaagcacaaataaagggaagatgctaggactgaaaatcccaagagtaaggtagctaaacctaagtcagaacagtcagaagtacactagaggaaagtaagtgagtgatatggtttggctgtgtccccacccaaatctcatcttgaattgtagctcccacaattcccatgtgttgtaggaaggactcagtgggaggtaattgaatcatgggggcacatctttcctgtgctgttctcctgatgatgaataaagtctcatgagatctgatggttttataaaggggagtttccctgcacaagttctattctcttgtctgccaccatgtgaaatgtgcctttcaccttctgccatgattgtgagtcctcttcagccatgtggaactgagagtctattaaacctctttcttttgtaaattgcccagtctcaggtatgtctttattcacagcataaaaatggactaatagagagattaaaaagaggtaagagaatcaaattatgatatcaattagttcacagaattagtgacaaattttatttacatggaatttgtaacatcctctcctctcctttctttcttgaaataactctttgaaaaagaggaaatagaaaattagcatttcttgatggcatactatgagccaggccaggtgcctcgtggtcaacatactgtcttcttcagtgcttatactaaagaatggtcagggtgttttacagcagtctgttaaggttggaggtacactgcattgagattctcaagaaagccaattcctcattagatgaaagaagtgagcaatcattcacctggatgcttatggtatgatgagtaagaacgtccatttcattcctggagtaaaattaaagagaggagaggtgtaatctgatgaatgctatctttagaaataaaagttagtagcagaaatctaatacggatttctagatagtgagaaaacaaaagagctggcatctctcgatgtgggacaactataaaaaataacatttcttaaaatttctgtgtttccacagcccattttatttgtgatttccaatctactgtcataaagttattgtccttaaagcaaaaaatggtcttaaactttgagtcataatatagattggccactggagaaactgcatctaatccaatgcaggttgagaaatgacatccccaaaggatacttgaggttttgtttgctacaaccaaaagggaagaaggaaggaaggaaggaaggaaggaaggaaggaaggaaggaaggaaggaaggagggaaagaaagaaagaaagaaagaaagaaagaaagaaagaaagaaagaaagaaagaaagaaagaaagaaagaaagaaaggagggaaggggaggggatgggaggggagggaagggaagggaagaagggaggaagggagggagggaaatgaagaacagcttcaagagcaaaagcaaaaagaaaactttgccctaggtctgaacagagcaagctgtgaacatcttggtaactcatgaagtaagcagatgtgacattatacttctgtcaagaaaattttggctaacaagaagtgcttttagctgcccaaggtcacacacctagcaaatggtggagttagaattcaaacataattgtgattcactctggtctgtaatcacagtattccctcacaatggccaacacatgagaattttaaaccaataatgagaaatggaaccataagaaatagagaacaatagaaatatgtagcaaaaccaaagttacttaacatacattagcacaatcaatttaattagaaaaggaaaatattatagcataaatattattctaatgaagaaatttgcataggaatgaaattttgatgaagctccttaatttaacatgagagaaaatgatatgaatgaaataaataggcaaatactcttgtgtagcaggttgggaagagctaagttctgttgcctgtgagatagatctgtattataggccatttttgttatatccaagctttactggacatattcactgtagtttggggaatatgaaagaacactggactcaggttctgacctctaacttgttataagatctataacaaattatttcaagaaatgtgttgacctgaggtatctcacttataaaaatgagggcggtagctagataagttagtatcacatattgttttgttaccgaattccttttttcaagtgaattcttaggttgatttcaaataagtaatgctaatgaaatttcagcagaataaatatgaaaaactaaaaacttccttctcctctgagctcttagatttatattttagagcatgtacagccttaaaacatgggaaaatgatactgaactgaaatatattttagcatttttcatactgtattcctaatgtcataactcttgaaagtgatgtttaaaaaagaattctctggttaataatatcattaaataatgaataccgcatctccctttttgagcgttacaatacatacatcaagttaagaaatcaatcaagttctgtagaaaagaaatctgttaaatttgtttattttcatgtatcgtaaatgaccttgagtcactttttttcacataaagtgaatgtaccaagaagaatcatggtttttaatatgaattacaagcttatgaactccaaggaccctagtttaaacatctcagccttctttcaggttctcaaatggtacttactgtagtaatagcaactcaatgaatattacttccataaagttgaattccataagcacagatttaactgagaataaaccatggaatatctaaagtaccttttcaaaaaagataaagtgattatacaaagcatatataaagcttgtcaaggaaaataaatctgagataatgtaaatatacatccaaaataggaaaaaaaacctagaaaatttttaatcttccttttactcattgacttcaaactacctaaaatttccttttattgatccattttctctccacttgtcagcttgtccattagtcaatgacagaagagaaaaaaaaaagatgagaaagaggaaatgttagaatcttagaagctgttccatctctatccagctcgtctgccagtcctggtcattcacataggcagtcctcactagcccttacccgggcttccataaaaagagcttctcttcattgagagctagtgcctttggtacagctcctctaataagataaagagtgtggtctgagactgattttccactgaaatgtggattgatgttctttaagtccctttcgcactaagtcccttttgcactaagattatcttcatcgtctatatgcacctctaagtagaaacaaaagagtaatgtcaaataggaaagaataatattcactcatctctacaaatggccaataaaagccaaaatacatagatagatatgattgtgtttgttttaggaatggagaataaaggaaaatagttaacactgtatttttgtataatgaacaaacactttacttctaagccatagataatggttgtgaataaaagaagtgagtaatggaaggaaggaaggaagggagacagggaaggaaagataaagaaaggaagaaagaaagaaaagcaaagaaaataaattaaggacagtaggaacaccaaaaagtaagatttttatcactatctcctcagtgctcaaatccctaaattggccataggacctacaataattcatttaggaagattttccattcctctttccaaaggataggagggttgaggaggatacttctgttattccatcacagtaaaagaagatgaattactgccacccaaaattgaaaatgcatgattgatttttcatagaaacttcttagtatgcagtgttaggtttgtagcattattgacacagcatgctactttgtatgcaatgtaattagtgagctgaccttgggatggaaactcaagctgcaacacgatgcttgtccttttggaatacaggctgatcatgaaatggagattatctgcacttattttcaggaaagaaagggactgtagtgaggtttctctaatccagaatagtttaaacatagaaaatgtttcagaggaaggcaatcaaaatgatgaatgagcgagagtattttatttatgtgaaaatataaatgaggcataaattatacaaaagaaacttgctgagataaaaaacaactttggaaaattgtgtgatggtccacagaatgtagaaagcacaaacatcaaggctagagaaataatttactaggtttcaagggttactagtacaaataatgagaataattaaaaagtaaaacaagagctgcctcctctatttaaaaagtagctgaaaaactacactaacttgaatgtggtctaggatccaaagcagaagtcttaggagtagagtctaacattatataatactcatgttaaaggaggcaaaactgcctacctagggaccaataacaattcatctacatttcctagatacgtttttttgactcatcagcatcatattcttttatgaataataagttcaactaatttgttatcaattctttccactattggaaaagtctgttggatatattaatgttggaatgacaagcagcttgtgctcttctctgggcatctaaaaatatcgccagatgcattgtgagcaatttaaaagccataattagcttacttccaatgataaatgaataacagctccacgtacccttaagagtctccaatgttgttcattagaaatatgtgaagagccacatacgtaattttaaatttcttggtagctacattttaaaaagtaaaacaaacaggtaagatttattttaataatacatttaatttaacccaatatatggaaaatattatagttacaatttgtggcactagccatattttaagtccccaataggtacatgtagccaattactttattgtacagcaaagaaactaagagaacagtagaggcataattctggggagaaaaaaaagcataggtcagtgaaaaggcattttttttttaacttaaggtagtgcacgtaatgattggattgtgctctctgtaagtgacttcactgagaagggaaaggactcggcactgtgtatgagctgaggtgagaacatcatcaaaataagaatgaacctctttttgtgatgaggaaatagagcaatttggtaataaaatgattttctttatatcccctctcagaatcaataaaaatatatcaaaacataattttaaaaatcttcatagttggcaactgcaatgatattaaaatgttgtcacaagaaaaacatgttgtgatgaaagttatacataaaatgatcaagaaaaacacttaaatttagcacttaaaaacattttgaggacagttaaagatgcccagattcagagtaccacttacagatcatcatccagaaatatgccaacaatatgttcctttgttcaccaaaaatatccttagtatttactatatacacggagcttttctagcccggggtacaatagaaacaaaaataggtaaaatccatgctcgataagagcaaatattctaaggtacctacgtaaattcatttgtctaccaaagctttgttaaatggcttctaaagaactttcttcattctttaccaactaatatgatctagagtttggtattataaggaaacatattcaatctgattgccaaactcaagaagtctggaatctgttttatctatctctgcatctgcctcagtacatatcagactgccttatacattatttaatgatggtattgagttgaatcaaactgaattaaatcaaattgaatttaattgaataaaatagaagccactgcattgttaaaagtaccaattcataaactagaaataccaccattaaaaatgaataccaaaaccagataaagactattctagggaaagaaaagtacaaaccaatatctttcattagcagagatgcaaaaataatcaagagactattagcaaattaaatccaatgatatataaaatgaatcacacaccatgactaagtaagatttatcacaggtatataaaatgggcactacgtgtcataatcaattaatgtaaacaatcatataaacaggctacagaagaaaataaatatgattacatcagttgattcagagaaaagattgatgcatcctggcatccaaaatcaattcatggtaaaaactctcagcaaactaggaagataggggaactttctcaacgtgataaagaacatctataaagaacctacagctaacatcatactcaatgatgagaaaccagatgcatttccacttggaacagcttctctttaacattgtgctagaagtcctagctaacacaaaaagaaaaaaagtaaaagtaaaatgtatacagacagtgaaacaagaaataaaattgtctctgtttagagattacataattatctatgtattaaactccaaagaatcaacaaaaatccccaggagcaagcaaatgaatatagtaagaatgcaggatacaaggttaatatacaaagtcatttgcttttctacataccaacaatgaacaataggaattttaaatgaaaaatatgataccatttacattggcaccaaagccaataaatcactcaggcataaatctaataaaatatatacaggatctatacaagaaaaactacaaacctttcatcaaaaacaccaaggaatatctgaaaaaatagagatattccatactcatgtatacttaatcactagattaaggcaatcccaatcaaaatttcaagttaccttgcagatatcaacaaactaattccaaagtttatatgaaaaagatgaaagacccagaatacccaacactatgttgaaggagaacaaattagcaaacaaactctatctgacatcaagactaagcataagctactgtaatccagacagtataatattggcagtagacacgtagattagaataaagaacccaaaaaacatagctaactgatctttgacaaaggaacaaaatcagttacatgaagaaaaagatagtcttttcaacaaatggtcctggaacaactggacatccatatgaaaacaaaatctagatatgaaacttaactgctttcacaaaaattaccttaaaatagattgcaaactaaatgtaaaatgcaaaactataaaattttcgaagataatataagagaaaatcatgacaatctttgatgatgagtttctatatacaatatcaaatgcataaattacagaaaaaattcaaagttgactttgttaaaattgaaaactgctctgtgaaagacattattaatagaataaaattacaagccacatactgtgagaaaattatcacaaaacacatatctgatagagggcttgtattcaaaatataaaaagaactcttaaaactcaacaataagaactcaaacaattcaataaaaagtggtcaaataacctgaatatattgacaaatgggatgggattaaagagcttctgcacagcaaaagaaactatcatcagagcaaacaggcaacctagagagtgagagaaaagttttgcaatctacccatctgacaaaggtctaatatccagaatttacaaggaacttaaacaaatttacaagaaaaaaaaaaccctattgaaaagtgagcaaaggatatgaacagacacttttcaaaagaaggcatttacgtggccaaaacacatatgaaaaaaaagctcaacgtcactgtcattagagaaatgcaaatcaaaatccacaatgagataccatctcatgccagtcagagtggcaattattaaaaagtcaagaaacaatagatgctggagaggctgtggagaaataaggacacttttacactgttggtgggaatgtaaattagttcaaccatcgtggaagatagcatggtgattcctcaagaatctagaaccagaaataccatttgacccgcagtcccattactgggtatatacccaaaggaatataaatcattctactataaagacacatgcacatgtatgtttattgcagcactatttacaatagtaaagacatggaaccgacccaaatgcccatcaatgatagagtggataaagaaaatgtggtacatatataccatggaatactatgcagccaaaaaaggaatgagatcatgtcctttgcagggacatggatgaagctggaagccatcatcctaagcaaactaacacaggaacagaaaaccaaacatcgcatattctcactcataggtggaaattaaacaatgagaacacatggtgggaaaaaacacacaccagggcctattggggggttgggagcaaggggagaaaacacagattatgggtcaataggtgcagcaaaccaccatggcacatgtatatctatacaacaaacctgcacattctgcacatgcatcctggaacttaaagtaaaataaaataaaataaaaacaataagaactcaaacaatccaataaaaaatggtcaaatggcctgaacatacacctcatcaaaaaagacatacaaatggcaaataaccatatgaaaagatgtgcaacatcatttttcattaaataattgcaaattaaacaaagagataccactatacacctattagagtgactaaaatccaaaaatttgacaataacaaatactggcaatgaagcacagcaaaagaaactctcattcatttctggtgggaatgcaagatggtacagccactttggaagacagtttggcacattcttacaaagctaaacatagtcttaccatatgatcaggctcctagttatttacccaattcacttgaaaacttatgtgcacaaaaatacctgtactcaaatgtttataacagctttacttataactacccaaagtggaaccaaccaagatgtttttcaataagtgaatggataagcaaactaggacatccaaatagtggaacaggattcagtgataaaaggaaatgatctctcaagccacaaaaaggtaggtcatgcttaaatgcaagctacatttaaatgcatgtgaatgcatattgcaagtaacagaagctagcctgaaaatgctacatgttgtgtgatttcaattatatcatattctggcaagggcaaactatagagacaaaaaatatcactggttgccagaggttagggcatgaaggcaagagagggaggaatgaataggtgaagcacagtgctcaaaacatacacacatacacgcacacacacacaaactcacaatgattagggtatgtcaaagtgccacaggagccaactgaaagagctcccaatgcccaaagatggggcaattggagcaacaaaataaaatagtattggataaaataaatatccacaagtccttatggatataaataattaaataaactaataaatgggagagaagaaacaaatctatccagaagaattccaaataacttatttagacctttcaccctaaaataggggaagcataactcccagatccttaagtcttggaagcacatagtaactttcttccaaagaatacagtatggaagaaaggggtaagaaaaacagtgaagaaacctgacaaacactacatcagccatcaaaatcaacatcaatactcataaatgctgtaaatcgtacataccctggatgtaatgtgattaaaaattatactttgcctttgtgatctttctccacaaaaaccataactctagtccaatagtgagaaaaacatgaaattctaatagaaaggcaccccaacaatgtatctgaccagcacttcccaaaactatcaaggtcatcaaaaaaagggaaagcatgataaatcatcacagccaaaaggggactaaggactcaggaccctagagtagaaaataaacattaggtaaaaactaaaaaaaaaatcagaataaattatggacgtcagttaataatatatcaatattggttcattaattttaacaaactgtgctaatgtacgatgttagcaataaggaaaactgtgtgtgagattgaagcatagagggaggatatatgcaaattctccctactatctgctccatctttctgtaaatttaaaacttttataaaaaataaaatcaattagccaggctcagtggctcatgcctgtaatcccagagctttgggaggcataggcaggttgatcacctgaggtcaggagttcgagaccaacctgatgaacatggcaaaaccacatctctactaaaaatacaaaaaattagccgggtgtggtggctcatacctgtaaacccagctacctgggaggctgaggcaggagaatcacttgaatccgagaggtagaagttgcagtgagctgagatcacgccattgcactccagcctgggccacaagagtgaaattctgtctcaaaaaataataaataaataaataaaataaagtcaattaataaaatcaatattctgacaagcccatgatatagtttaatataagtaagatcaatttttggactccatataactgagagccattctagggatcttaatgatgtccacaaaaatgcagtgccaagacgatccagcctaaaagaacttgccatccttactcatttattataaaatctacaatactacagttttctgtgataccagtgcttgtcagaatatgaagtacttacatctccatcttagtcctgcaacctaatctagtaattaccctaattctttcttgtcattcattcacagctaatcttgaaagatttctctctcacaatggcattttccattcattcttcaatccataataatctgggttctgccccaattcactcccaaggtcaataatggcctacctattgccaaaatcaatggtcactcacccattatcttattttacttttcagaagtgttagacacattatttattccttccttttttaacacgtgcttcttttgtattcatcacatcttggggggtgtgtgtgtgtttgtgtgtgtgtgtgtgtgtgtaactaagagggggaagagagagagagagagagagattcctgttctgtctttaaacattattgtccataaagtgcagtttagcaagttttttactctgttagtctctccatgtgaccaccttaattcctatcactttagtaactactatatgttaatgtatcccaaatttttatctcccatccagagctctttcatgagagtgagaagatgtcttcctacttacaatggcattttcacttgacagccctactcacatatcaaaatcaacatgtcccagaatatcctatcatccctgtcattcaaaactgcttatacacttatattctatatgttagtatatggtatgcctattgtttactcaagacaatagcatagttgttaaaatcagttcatccttacttcaaatataaaatcatcccttaattattttcaattgtctgttaatttttaaaaatccatcaatttctatctgtcctataattttcattctcatttaagccatcatcgcttgcctagtttcccacaacagcctcacaccagtctccacacctccttgcttcttccttcaaatctgttcttcagtctctctcatcattccccaattcaaagcactgtattaactcctcttcgttatttgtttgaggtttaaatgatatcattttgcatatagggcttttcataattaggatcctggataaccctccagtctacttttctccttccttccctccttctacttcacattatgctaaactgcttttagttcctccaatgtctatgctgctgcatatttctctacccaactctcattgtcaatctaacttcagagttttgcctaaatagaccttccttcaggatgccttctctaaattcacaaatctcaagtagttgcctctctatatattaccacaccctctccttctctctctctttctctctctctctctcccccccaccatctctctctctctctcatttctaaatttcctgactgcttacccatactgctaattaaactccaagcactatgaagttagtgagaatatctaaattattattatctccccaagaatatctaggacaatgactgacacagtaatatttgatagatggattgattgatcgattgaaggaaagatggatggatgattaaaacatgaaagttgaaaaatctaaactcagacctctttttaaaaaaataaataaataaaacctctctggactgagttactccttgcttggtgcttttgattttaatacattatctcagaaatagccttagtttctgtgagtataaaaaaaaagtataaagaagactcactgtgtcccaagtttaaagcaaggattttccaagagatcattattgctctagggttgcaatcagcatgttaatcacctaataccatgtttggaactacacatgaatggacaggaccaaaattccaagacatcaaaggactcaagttgaataatatcaacttgaaagtaatcagagaatggttaaaaaatgaattgtcagcaactgaagaataacagtgggaattaaccaggacatgctatggggctatgacggcaaattgaatatgggatgtataaatagctacataagccaaaatcaaatacttgcttcaggcagcctttagacgtgacagttggacagtccaggaagatttcaaaggtttaagagaatagatctcgagcagattaggaaagtctggatattaatagcagcaaaatatatggaataataggaggtgagatcaaagatattttgctatgcttaagcgcaggagaagactgaaaaacaaaactatggagtgaaaaacttggaggtcaaagatacatactctattttctccaaatcagcttttttcattcaaaaccagcaatagccaaacagcttcaaaatgactttttaaactttttccttaagttatactttaaaattaaataaaatctccacaggaaaactactattagatatttcccttttgaaatgtgtaattataatgtcttatgttacaaataaataggcactaaaatggcattaatggtaaactcaatgttaatccaattaaaaataataggccaggcttggtggctcccagcactttgggaggccgaggcaggaggatcactgaggtcacgagtttgagaccagcctggtcaacatggtgaaaccccgtctatacagaaaatacaaaaattagccgggcatggtggcatattcctgtaatcccagctactcgggaggctgaggcaggagaatcgcttgaacccaggaggtggaggttgcagtgagctgagatcgtgccactgcactccagcctgggtgacagagcatgtctctgtctcaaaataataataataataataataataatgataataataataataataatgagtgacagctgaaatctttctttcgatgtctactctgaagtccactataacttattattgcttgtattgttttgttttgtaaatgaagacatcatcaaagaggaaatagctattaatttttatcaattttgaaatcctgcctttacatcttccttcgctgatgtcacctccacttagatcattcagaaaatagttggccaagaaaatgactattctttatttttgtcccaaatgttttagcttatctaattctaaagatccaaatcaccaggttattgcaaatcttccacttgattttttcagtataaatttgacctactaatgtttaaaattcctgaagtacaggaatgtggttcagcttttctctgctgtcacctatgtgtcacacaataacaagaaggaaaaaaaaaaccctaaatgttcaaaaagtacctgtggggtaaacgagtaaaccaagagtaagagaaataagtcccttaatcatttgctcacctcgtgccaggtataatgcctaggtgaaaagaatggttagaacatacttgaccacctgtcttttacccataatatcaagctactaaattgctaatttctgaaaggtctgagatacctggccgtatctttttgcctatcttttttgttgatttattttgagggggttccacattttctcattatctttcttttcctgcagcaatttgtgcatataactgcttttaatccataaagttgttgttacaaatagtactctctttgatgaagaacactgtacttgacaggttaatgatattaaattttttaataacttcctatatttaaataaataatgagaagatgcaattcatttgtttatttttagtccttcaaccctctacaggcagttaatatagaggaagaaattaaggcaaactcatttctgcctcaggaactagagttgagctcctctcccagtgtcaaatgtttatttgaatttccacacagaatcaagtgccaattatattaaaataatctagacaccttcaaaatctaaagccccattcatgggataagttggaatccaaaatttatggaaatagtgatttcataggtgtctgtagtaacttgttcccttggctaatgtgcccattgaactaaacaacactgatgcaaaattttacgggaaaattatattaggtagccataggtggaaacaacatctgacttttcagctagtttctcttaaataaagagcattaagtgtcatgaagtaaaatctataattagatttatgttccccaaaactaacactccaaagtttagaaacaggcatacctggttatttcaatttataatttttttttcttggaattcttttttgaatgcagggtatttttctacagttctttgacttaatattctctgagggtagatttttctgtgtgcatttactcatttgtttgattttggttttgctcagtaaaaagatactttatctaatttcctttccatatttccatttgctttgtaaaattaacttaaagcatgtgtacagacttggatgaaactcaaagtagaaatacataactttcttagtgagaaatgtaatttggtttttataaaacagtgtatcttttttaattgatggacaagttttagaaaccacatattcttggtttgtggctatactatctaattttctaaaatagattcatctagttgctctctgtatatactagttgtgacattcccttgtcgtttcacaacttttttaaaaaaaacttggcatataagagttcccctcccttaggtatatttattcaaacttggatggtgtgacaacaggtatcaggattttgctacagacacagaaaaaaacttgagtcacactcttgttttcttgaagttaccagatggtggtggctggctgctcctcacttaggtatgaatgttcaaaattgtaacttttgtttaaggcagaacaaaaattttaaacctgttatttggaaaggtgttttttctgagcaaccttaagaaaacgaatgccctggaaaatctttattattgattcataacattcatttttaatagattttatatcctagctcatgtttcacattttacaccatcttcttctcaggcctgaaggtaaaattctcatggctgcctatctctggccagtgattttctttctctctattctctttcagcaacagtttaatcaaagggaaggcagtttactttttcagaccctctgctcccataatgacttccatatcttttattaaatgtagtaggagaaaaattaagcactgttaaacagggatagatgttggtcaaaacataaaaaatgattttaatcagttacaattttgaacgtttaagggagaataagttcaagatatctgttgtaaatcatggtgactatagtaaaacaacaatgtattttaaagaataaaataaaagctcttatagcatgactctgttttacatatccagaatcattgagatatttgcataaagtgtcataatttcccctctccctttggctttcttatccaggcgcacttgatttccactgatatcaactcctttagcctattatgagtgcatctatacccctctttctctgacactctattcccagccttttctctttccgacatgctccttttccagcattctctgccttgctttggcattctttctccaagcccactctcttctcttcctctctcttcaaactcccatatacctcctccgttctcatttctgctgaattgctgatgggattttcagctcccattcaacaatttttgtttcttttctttctgccaatctagatatgaaatttggcctcttttttcttgaattttacttaaataataataaacaaaaacacccacaaatacaaagtatatagtagatattattgaatgttttggtgtcagagttctatatcaaagtcatgcaaataccttaaaattaaatatgacatatccccactcttaaaattttttcagccagtctcatgtaccactataacctgagctcactccccctacacacaatttcaagctaatttttcatgtagaggaattcagcgatatttttgtaatccttatcacttgctaactcatgccttgttttcaagccatgccttgaaaatctcactttcaagccccaagcacttaacgttattttccttacttattaaaaaatagtgtcatttcttaagatcataatcttttactactataagtgacattttaacactttataatgtcttcaaaataatgattaactctattcacattatgtatcttaattatgaaaactgcatagtaaggaattacattcagctggaaaaaaatgacaaattaaggtgtttacttgtcttacttgaagggagttcagagctaggttgctgtggcaggtctgaatgtgttcaggaatctaggcttcatcttctttccactcagatgtcattaacatcattgtcacctcatagtcacaagacgcatgtccatcctgaacattacatcaatgtcccaggcaggaagatgggaagacaaaagacagaaggtatgtgccaacttaacctggctgtcttgagctttgatggaagcaccaccagtatttccacttatatctcattctgtagatctgtttcacaatggaggtacattgttaccctcaactaaactgaagtcctgttgttagggagaaaagattttgactatagggtcatagtgtctaccaaaataaaagttctaattcttacaatttcattgaaaacctatctattcttcagctcataacaaggatcagatcatatggttttggcatagtgtattgtaactttatataccttgtactattttaaatcgttaaacaacatattacttgcaatggtcagtatggatgaataattttgatggtttgcaggtgcacgtcttggactaggtttatcaaccttattgctattaatatttgggtcagaaaattctttgttatggaggctgttctctgccttgcaaaatgtttaacagcacccctgacttctacatgctagaagccagtagccctccccacctctagttgagacaacgaaaaatgcctccagatattgcccatgctctctgggaggaaaaaatgttgttggctgagaaacactctcttggatggatgagattttttttgtaatggcattaaaattacctgggatgtcttttaaaaaagactctactcccaattttctgattcagtggatattctttgaagcttcctaatttgttttcattaagtcccttgtataattctgacacatacccaagtttggaaatcattatatcatacaaaggctaaattacccagcagtcaagatggagcctgtcacttagacaaatgataaaagggaaaaagctagaagcacttggaaccaggcttggagagacaacctctgttgaggtcacccacaaaggagcacagcaaattgtctaagtcatggtgtccaaaggaaaaaggtgctctcaggatagtacttgtagctgagtagtactctaaaacactgagagttattacaatagctattcaatctttctgaacacaattggacaagcatcaatattatacatttacaatttaaaagaaagggccaggtacagtggctcacacctgtaatcccaacactttgggaggcagaggcgggagaagcacttgagctcacgagttcaagaccagcctggacaacatggtgaaccccagtctctacaaaaactacaaaaaattagctgggcgtggtggcgggcgcctgtagtcccagctactcgggaggctgaggcaggagaatggcgtgaacccaggaggtggagcttgcagtgagccaagattgcgccactgcactccagcctgggcgacagagcgacactccatctcaaaaaaaaaaaaaaaaaaaaaaaagaaagaaaagaaaagaaaaaaaacttagccaggcagggtggtctgtgcctgttccagctactcaagagggagtctgaggtgggagaattgcttgagcccgggaggcagaggttgcagtgagccgagatcgcgtcactgcgctccagcctgagtgatagagccagaccttgcctcaaaaaaataaaataaaataaggaagtaatattatcattcatttataacgatcacataaatgataattatggtaatattaccattaataatattaatgacttcattataatgaagtaaaattatcaaattttacacttaaatagaatcaataggaaaacagaaagtttattaaatgcctgagaaaagagtatacagaaaaacaaatatacatattatataatatatgtatctacatacacacgtacaacattatactcacaagcaacaactagttagaagatatgatggaagattccatttatgatggcaataaatatctaaaaataaaattaagtaaatgtgaaaatttatatttaggagactaaagtgtactggaatgaataaaagtataagtctgcttcttggataaaaagactcaacatcataaagataaatattatccctaagctaatcactagccatacatttttctaattagcaaggtgattctaaagattacgaacaataataaagtaagaacaatgtagcagatagcactaccagatattaaaacagattttaaaggttaaatgatttaaagtatgttgttagtgcatgagtagagagaatcatgaaagaaacagactaagatgagaaatatgcaaaatacaaatgggaatttgtaacatgattaaagtgccattctaaatcagtagaaaaaataattatcattcactctatgagaagatcaaggatttaaatttcaaaaataaaaccaaaaagtaattttaaacaatcagtaaattttctgtttaaaacaaggaaagacctttttagcataccatcaaatctgtaagctattaaataaaagacaaatacatttgactctttaaaaactaaaataaaaaaatatgaattaaaataccaccatgaacagagtcaaaggcaaatgtccaattgaggggaagatgcagcctatagacaaaggacaaatttctacagtatgtaaacagctttacaaatcaacaagatacattggccaatcttactgaaaaaatgaacacaagatatgaactaaaagttcatatatagagaaataaaagtggtatttttaaaatgtgaaagatgcaaaattttacttataataagataaatgtgaattaaaagacaattgagataccactttctatctgtgtaacaaacatccaaaagcctgataacaatggaaaaatctggactctcattcatcacgggaggatgacttgctctatcttttttgtgagcaattttgaaaaatctgctaaaattatcattgtacaaactctttgaaccaataattccactttagaaatttaccatgtaggtacacatgtattcgttttctattgttaacatacttgtattggttttctatcactgctgtaacaaattgccacaaatttaaacttcagcatacacatttattatctcacagttctgtaggtcagaagacagatgggtttggctgttttttttagtttagaatctctcaaggttttgacagggctgtactttaatctgaagcttctgcttattcaaattctgcagaattcagtctcttgcagttctaaggaaaagaaccccatttatttatatatccattcattcattcaattattcgttgattgatttatttgttgttgactgtcagctaagaagagtcaccagcttctaaaggctacctgcctggagtccctgaattctgactcacttcttctatcttaaaagccacaaagatgggtcaagttcctctcatgtttcaaatctcttctgcctctgtgtccatattgtgtcactctgactgacctcttccagtcaactcaagttgcaaaagttcctcttccacttttaagaacctgtgtgattacgttaggcccacctaggtaatcttcctatttgacgatccatgaccataatttcatctgcacaattccttgtaccatgcaatataacatgcatacaacatagccctagaggttgaaaattatagggttaaacttctccctaccatattgatatatattcaaaactatttacagcaccactgttggcaatagcaaaaataaatgaaaacaatctaaaaatcctccaaaaaggacagattaaggatattatgggaactcgtacaatggaacattattcaattgtgagtaaaaattgaggaagagccctattttcaaatacaaaaagctcttaaggactcgttaagtgaaaaaagcaatgagcagaactatgcatactatgctacagaattttttttctagataaacaaaaggaaaagaaaagtaaatataagatttttgtttaaaactgagactgattctttcaagcagaataaaagatatttaacagacttgtaattttcataacatgtaaacttatttcaaacaaaatttttaaaaagagagttaaataaatttctttgtgcattttggtctctgtggttttattgttgctattgttgttcatagttagatacaggtaaagaaggaaagctggtctaaaattaaaatgagctatggaattgcctgccacaaaaagctatatatccttcacaggttttaaccaagtatttcattttctccttcagttccttatgcatactatgtatgagctgttactgccgcatctctaaagatatcttaataactaataaaaactgcaaaatgttactttaaattaaatcatcacagtattattggccttcaaccaatatttttaatgaaagcatattgtatagctgaattacaaatttgaagcctctagttgacaaaattgcaaaaggaaaaactcacatctcagaaagtggcattttatggaagccttcaaaaaatatgggggaaaagcaatctatctttctcaaaaaaagctgtttacttttactttatttgtttttgagcgaatttaaaatcacatttacttgtttctcttctcattgcctttttgcctatctcattgatatttcaggctcaatagatccaaagtcagaacatgttcctttctccctaccacctaaccccaaatgtatcccttttcttaatgtctctgtctctgttaatattatatatctgtcttagtttgctccaaataccacaacaaaataccacatactgggtggtttaaacaacaaaaaaaccattttcttacatttctagaggctaaaagtccaagatcaaggcactggcaaggttagtgtcctctgaggactccctcctaggtttgcaggtggccaccttcttgccacgttctcaggtggtcatctctaggtacacgtgcacaggcaccccgttctctctccactctccactctctgtatgtgtcttgatcttctcttcttataaaaataacagttagattgaattaggaccctctctgaaagcctatttaacctaattacctctttaaaggtcctgtctctcacattcataggatactgggggtcagaacctcgacataggaattctaggaaacacaatccagcccataataacatccaaatattctaatcactcaagaagggctgatgccgtttgactccttcctctctttacctctttccattcaaataggttttgtacagattctactatgtcacctttttgtactctccatttctactctaatggagatttcttatttggactaattcctacagcatgttaacaaactctccaatactgccttacactttgccaatagatctgtctaaaagtttgcagtgataattctatataaactcaaagaccttcagtgactattacattattttctaatgattgcctaataattacttaaactgctttttaaaaatgtcttttaaggcctattctcatctctttcctaagcctctaatgttatgtcccatgatttccctgtagagactttagtcttagaacagtgtgttcatactgtgcagaaataattattggcgaatcatgacactaattttggccagcatttacgaatagaatagaatagaatagaatagaatagaatagaatagaatagaatagaatagaatagaatagaatagaatagaatagaatggatcagagtaatattaaagagtatctagatattcatccacattataaagttttagttcaggcctctttttcttctccatcaagttattccttgaggcttccctgaactttttattttatgcctttctctgaatattttccagacattattaccttataggtaattagattgtacaacacatgaatataaattacatttattttcccaagcaataactgaattctgtgcacagaagtccttattttctgaaatctttcctctgactcttgactcacaggtgggttcaaaacctgggaatgtgccacgtggtgactctgcacagcagcatgacagcagttaaggcattaaaaacaccacattccccaacatttatcagagtttgaaacctcctaagcacccattttgaattttacactgggcaatttaaatgtaacactgaatggacctgaactattagtcatgtacaagtgctgctgtaagtacttaaaaagatttgtgttggttaaacatccacagagctagggcgctgcaaaccaaccaacaaaacaaaaacctaggagccaaagtcttcctgactgctgggaacagaagtgaagtttggctgttacagcaaaagacttagtgggatgggaggacccttttatggtaaaataaggtgagaatacaacacaatatctggtctagacagggaagggatataaataacagcaaattatttctgatggattttattttttaaaggaaatttcaaaataaatcaatgctatatgtcttagtccatttgggctactacaacaaaaataccacagactggatggcttaaacaacaagttttatttctcatgattctgaagactgggagtccaagatcaaggtactggctgattcagtgcctggtgagaacccccttcttagttcatagatggctgtcttcttactgtgtcctcacatagaagacagagggagggagcccaggcacagtggctcacgcctgtaatcccagcactttgggaggccaaggcaggtggatcacttgaggtcaggagttcgagaccagcctggccaacatggtgaaaccccatctctattaaaaatacaaaaattagctgggtgtggtggtgggtgcctgtaatcccagctactgaggaggctggggcaggagaattacttgaactcaggaggtggaggctgcagtgagctgagatcatgtcactgcgatccaggctaggcaacacagtgagactctgtcacaaaaaataaaaataaaaaaataaaaagagtgaggtagttttttggggtctctttcataagggcactaatcccatttgtgaaggctgcaccctcatgacctaatcaccgcccaaactcctggtaccatcaccttgggtgttagaatttcaacatataaattttaggggaacacaaacattcagtcattagcttcatatcattgaaattaattttaaactcttttatccatccaatgatgttgcaaagtccatttgattggcacctgcatgtgtcccagaaaccaaatgaactgatttgggttacctctatcctgccactccttgctctatgtatattttgagtaacactaaagaaatcactgaggcagagagaggtttgtcttccactagtcaaaacatgggcacatgtgtgaagactatttttatttaaaaaaaaaaatacatagaaacattggatgaggaattaaaagtggttcaagttaaccatagtgcatgtcatcagaactttgggggcattgagagttttggccacacaagatttgtgcttgaaagaaaatgtgcagaccacaaaaaataaagagtacacacttcaaattacaagaaaatttatattttaaattgtgttcaatattatcaacaaattacaagactaatgcttacacatttatgatttaaatggcaccaaatttttcattatagctaagaataattcttccactggccatttatttcttatattatctaggctgattattcctcagttaaaattccccatttctcatattatccagtctgattatcccccagtactaaagtgctatgtcaaaatattgggtattttccttatgaggccactgttaatatacatgtagtaatttgaaacagcctcttgagacttatacaattggaataggaacagctccagtctgcagctcccagcgtgatcaatgcagaagacagctgatttctgcatttccaactgaggtacctggttcatctcattgggactggttggacagtgggtgcagcccacagagggtgagctgaagcagggtggggcatcgcctcacccgggaagtgcaacgggttgggggatttccctttcctacccaagggaagccgtgacagactgtacctggaaaaatgggacactcttgctcaaatactgggcttttccaatggtcttggcaaacggcacaccaggagattatatcccacacatggctcagtgagtcccatgctcagggagacttgctcactgctaatgcagcagtctgagattgacctgcaaggcagcaacccagcaggaggaggggcaaacaccattgctgaagcttcagtacataaagtgtcgggaagctcgaactgggcagagcccaccgcagtgcagcaagactggctgcctctatagactccacctctgggggcagggcatagctgaacaaaaggcagcagaaacttctgcagacttaaacgtctctgtctgacagctctgaagagagcagtgattctcctagcatgttgtttgagctctgagaacagacagactgcctcctcaagtgggtccttgacccctgtgtagcctaactgggagacacctcccagcagggaccaactgacacctcatacaggtgggtgccccactacaaagcttccagaggaaggatcaggcagcaatatttgctgttctgcaatatttgctgttctacagcctccactggtgataccatggcaaacagggtctgcagcaaactccaacagacctgcagctgaaggacctgactgttagaaggaaaactaagaaacagaaaggaatagcatcaacatcagcaaaaaggacatccacaccaaaaccccatctgtaggtcaccaacatcaaagaccaaagataaataaaaccacaaagatggggagaaaccagagcagaaaagctgaaagttctaaaaaccagagcacctcttctcctccaaaggatcacagctcctcgccagcaatggaacaaagctggatggagaatgactttgatgagttgacagaagtaggcttcagaaggtcggtaatagcaaacttctccaagataaaggaggaagtttcaacacatcgcaaggtagctaaaaaccttgaaaaaagattagatgaatggctaactagaataaacagtgtagagaagatcttaaatgacctgatagagctgaaaaccatggcacgagaactacgttacacatgcacaagcttcaatagccgattcgatcaagtggaagaaagggtatcagtgattgaagatcaaattaacgaaataaagcgagaagagaagtttagagaaaaaagagtaaaaaagaaatatgggactatgtgaaaagaccaaatctacatttgattggtatacctgaaagtgaggaggagaatgaaaccaagttggaaaacactcttcaggatattatccaggacaacttccccaacctagcaaggcaggccgacattcaaattcaggaaatacagagaacaccacagatactcctcgagaagagcaaccacaagacacataattgtcagattcaccaaggttgaaatgaaggaaaaaatgttaagggcagccagagagaaaggtcgggttacccacaaagggaagcccatcagactaacagcagatctctctgcagaaatcctagaagccgaagagagtgggggccaatattcaacattcttaaagaaaagaattttcaacccagaatttcatatgaagccaaactaaccttcacaagtgaaggagaaataaaatactttacagacaagcaaatgctgagagattttgtcaccaccaggtctctcttacaagagctcctgaaggaagaactaaacatggaaaggaacaaccagtaccagtcactgaaaaaaaaaaaaaaaaacacaaattgtaaaaaccatcaatgttaggaggaaactgcatcaattaacaggcaaaataaccaggatcatcgtaatgacaggatcaaattcacacataacaatattaaccttaaatgtaaatgggctaaatgccccaattaaaagacacagaatggcaaattggataaagagtcaagacccatcagtgtgctgtattcaggagacccatctcacatgcgaagacacacataggctcaaaataaagggatagaggaagatctaccaagcaaatggaaagcaaaaaaaaagcaggggttgcaatcctagtctctgattaaacagacgttaaaccaacaaagatcaaaagagaaaagaaggccattacataatggtaaagggatcaattcaacaagaagagctaactatcctaaatatatatgcacccaatacaggagcacccagattcgtaaggcaagttcttagagacctacaaagagacttagactcccacacaataataatctgagactttaacatcaatattagacagatcaatgagacagaaggttaacaaggacatccaggacatgaactcagctctgcaccaagcagaactgatagacatttacagaactctccaccctaaatcaacagaatatacattcttctcagcaccacatctcacttattccaaaattgaccacatagcttcaactaaagcactcctcagcaaatgtaaaagaacagaaatcacaacaaactgtctctcagaccaaagtgcaatcaaattagaactcagaattaagaaactcactcaaaactgcacaactacgtggaaactaacaacctgctcctgaatgactattcggtagataacaaaatgaaggcacaagtaaagatgttctttgaaaccaatgagaacgaagacataacataccagaatctctgggacacatttaaagcagtgtgtagagggaaatttatagcactaaatgcccacaagagaaagcaggaaagatctaaaatcaacaccctaacatcacaattaaaagaactagagaagcaagagcaaacacattcaaaagctagcagaaggcaagaaataactaaaatcagagcagaactgaaggagatagagacacaaaaaacccttcaaataatcaatgaatccaggagctggttttttgaaaatatcaacaaaattgataggccgctagcaagactaataaagaagaaaagagagaagaatcaaatagacgcaataaaaaatgatagaggggatatcaccaccaatcccacagaaatacaaattaccatcagagaatactataaacacctctacacaaataaactagaaaatctagaataaacggatgaattcctagacacatataccctcccaagactaaaacaggaagaagttgaatctctgaatagacaaataacaggctctgaaattgaggcaataattaatagcctaccaaccaaaaaacgtccaggaccagatagattcacaggcaaattccaccagaggtacaaagaggagctggtaccattccttctgaaactattccaatcaatagaaaaagagggaatcctccctaactcattttatgaggccagcatcatcctgataccaaagcctggcagagacacaacaaaaaaagagaattttagaccaatatccctgatgaacatcgatgcaaaaatcctcaataaaatactggcaaaccgaatccagcagcacatcaaaaagcttatccaccacattcaaattggcttcatccctgggatgcaaggcttgttcaacatacacaaatcaataaacgtaatgcatcacataaacagaatcaacaacaaaaaccacaagattatctcaatagatacagaaaaggccttttacaaaattcaacagcccttcatgctaaacactctcaataaactaagtattgatgggacagatctcaaaataataaagactatttatgacaaacccacagtctatatcatactgaatgggcaaaaactggaaacattcccattgaaaactggcacaagacagggatgccctttttcaccactcctattcaatatagtgttggaagctctggccagggcaatcaggcaggagaaagaaataaagggtattcaattaggaaaagagtaagtcaaattgtccctatttgcagatgacatgattgtatatttagaaaaccccatcatctcagcccaaaatctccttaagctgataagcaacttcagcaaagtctcaggatacaaaatcattgtgcaaaaatcacaaccattcctatacaccataacagacaaacagagagccaaatcatgagtgaactccaattcacaattgctacagagagaataatacctaggaatccaacttacaagggatgtgaaggatgtcttcaaggagaactgaaaaccactgctcaaccaaataaaagaggacacaaacaaatggaaaaacattccatgctcatggataggaacaatcaatatcgcgaaaatggccatactgcccaaggtaatttatagattcaatgccatcctcatcaagctaccaatgtctttcttcacagaataggaaaaaactactttaaagttcatatggaccaaaaaagagcctgcatagccaagtcaatcctaagcaaaaagaacaaagctggaggcatcatgctacctgacttaaactacactacaaggctactgtaatcaaaacagcatggtactggtaccaaaacagatatgtagaccaatgaaacagaacagaggactcagaaataacaccacacatctacagccatctgatctttgacaaacctgacaaaaacaagaaatggggaaagaattccctatttaataaatggtgctgggaaaactggctagccatatgtagaaagctgaaactggatcccttccttacactttacacaaaaattaattcaacatggattaaagacttaaatgttagacctgaaactataaaagccctagaagaaaacctaggcaataccattcagtacatagacatgggcaagtgcttcatgactaaaataccaaaagcaatggcaacaaaagccaaaacagacaaatgggatctaattaaactaaagagcttctgcacagcaaaagaaaccaccatcagagtgaacaggcaacctacagaataggagaaaatttctgcaatctacccatctgacaaagggctaatatccagaatctacaaagaacttaaacaaattttcaagaaaaaagcaaacaatcccatcaaaaagtgggcaaaggatatgaacagacacttctcaaaagaagacatttatgcagccaacagacacatgaaaaaatgctcatcatcactggtcatgagagaaatgcaaatcaaaaccacaatgagataccatttcataccagttagaatggtgatcattaaaaagtcaggaaacaacagatgctggagaggatgtggagaaataggaatgtttttacactgtcagtgggagtgtaaattagttcaaccattttggaagacagtgtagcgattcctcaaggatcttgaactagaaataccatttgacccagtgatcccattactgggtatatacccaaaggattatagataatgctactataaagacacatgtacacgtatgtttattgcggcactactcacaatagcaaagacttggaaccaacccaaatgcccatcaatgatagactggatttagaaaatgtggcatgtatacaccatggaatactatgcagccataaaaaaggatgagtccatgtccattgcagggacatggatgaagctggaaatcatcattctgagcaaactatcacaaggatagaaaaccaaacactgcatattctcactcgtaggtgggaattgaacaatgagaacacttggacacagggaggggaatatcacacaccaggcctgtcatggggttgggggcagagggagggatagcattaagagaaatacctaatgtaaatgacgagttaatggatgcagcaaaccaacatggcacatgtatactatttaacaaacctgcacgttgtgcacatgtaccctagaacttaaaagtataataaaaaaataaaaattaaaaataaataaataaaaagacttatacaatcatcactttttttttttttttttttgagatagagtgtcactctgttgcccaggctggagtgcagtggcacgatctcagttcactgcaacctctgtctcccaggtttaagcaattctcatgcctcagcatcccgagtaactggaattacaggtgtgcaccaccatgcctggctaatttttttattattattattatttttaggacagacagggtttcaccatattgtccaggccagtcttgaactcctgaccttgtgatctgcctgcctcggcctcccaaagtgctgggattacaggcatgagccaccatgcctggccatgacttcctgtaacattaattagattgtttctcacaccacctccatgaaaatcagtgggggtagtttttcaaactgaagatttttggtacctcccttggatctatttaatatgaaactctggatcatggcttacatttctgaattcttaacaaatccctagactttctcttgtaccactgccaattgccctctgtcgaggtttcataagaaaaatatatttgcagtttctacttaacttcattttacaactttggagcaaatatatatcactcaggtactgggaagaggaataaagggagcaggagaatgaggaaaagaagcgaaatctaatgagattatgaaagggaagcctcaataggagagaaatgctggcagaaattgtcttctaagttcacaattttgccatcatatccaaccatgtttttagtactacattcttgggataaaggggagatatcagcttctgggaggacttttgtcccttgttatgtttcaatactggtgagaaatcttcactgagtagcagtagctgtggtcacttgatgtagaggggacagagcttgctaatccctttaacacattaactgttaatgctattattactcatgatgttactgttctttggaacctgtttgtactgaagcaatatctttacgttacttttattttttattatttgtctttaacttttattttagggtttaggggtacatgtgcaggttttttatataggcaaattgtatgtcacggaggtttggtgcacagattatttcactacctagctaatagacgtagtgcctgataggtagttttttggtcctcacccccctcctacactttaccctgaagtaggctccgttgtttgttgttcccttctctgtgtccatgtgtactcaatgtttagctcccactgataagtaagaacatgcttaaactacttacttactgctgattatatcattactcatggtgctatatcatccatcatgctgccgataaatatccgcactcattgtctctctcaaaagttctactatgctttgttgatgatgaccataagtgcaagtcttacccagaggatgcaagaaactaaatggtaatttgctttctggtcatgttatatttgccatttggaattcaatattgcagtcacatatcaacatattttcacccgctcacttctacatattgccaaaagcagaaaggatagacaagtctctatgtggggtgataagaatgacctcattttgtacaaagaatatctgtccgttgtcaaccatgtgttaagaccaacccaggagagtatgacatcagtgaagcattagtgttaaggagaaaatagtcttaaagtcctcagaggacgtagaaggagacaggagctgaggccatttctggaggattacctgacatgcagcatggaggctcagaaggattggggtaaccgctgtgaatgtcagtggtcggtctgcacagagtaaatgatgcctgcttgttacctctgtgtatgagtgcgagagactggagaccgcactattgtcggaacagatatgttcgtgagccattgtgttagcccacactgttgcttaagcctaaggggtggtaatgagcatgggcggcccacagccttaaagtcttcctgcagtccacaatgtgcatgagggtcactcaaattcagtgtgtaaacactaacacagctgtccagtcttatgcaaccatgcaaacaaatagaccaccaccaccaccaacaaaaaacccatcactctggccagtgagcatgatcttcttgccagtctgggctcctggaactaggacctggaatggggatcagggacaactccataggaacagagctcagagctccttgtgacatctggtcaacctcacccactgagtagaatattgaaaagtgtccccccggaagagaactggggctcagttcagactcagatgcttcacataaaatgcactgaattctcagatatgggagaagggcttagaaaatgtgaaaatgacacacaaaggcataaaactttgttaatctcagaccagggaaggggcctggtttgcatggacttaagaaaagtagtcttgataataaagctctaatgttaaagggctgatgaacggacataaaccttggtcaatgttaatctctttcaacagtgcttaaaatttctttttgattaattcatgacaataacggtatgtatttgaggtcaggttaattaagtctttaagttcttcagaacagactgatctctgtcctctctacatcagcattgctttcttttcctcatggaggaagaaatgaggttattcaagaatgatgcatttgacaatgaagaacaggaagagatggatcctagacctgaagctaaagagttagtgcctcaaccctgtaacaaaacttcatgtgcactgaaggaacaatatttttaaaaaataagtacccttccctacttctattttaaatcatcattaacaaatcactattcttcatgtggaaccatacattttttaataaatttgtaatcaaattgcccttagttctctctttctccactatgagggcatgaaacttatggccctccacagagagggccataagacataagaaagttgtcaaccattccaaatcattatctagacaggtgcctcccaaaaatatttacctggaggacttcaaaccctagtggtggacttgattatcaattcccttccagtaaatctctctctctctctctctctctctctcctgttccccactcctcaacctctcctctattccaactggtatctcataactatcagtgaagctggaatgagagactacatctatgatctcatctgatgattttatgtcctgattttgtcctgatttttttaagaaacaattattgttgacgtttggaatcttaccacagggcaggaggatagacatagctagggtttactgatgaagaagttaaagtcttgtctgtctcataaagctaactgaataacaaatgtatcgcttaaatatccaaacggtgtagctggcttattaaaatggtgtgggctgagagactaattgtgacctctttcctcgttatgtttttgcttgaaaaagtactcagcttgctttcggttgtccatatgttggtgaagatgcctgattgtatgaagctaaagtcttctaaacaacaaaagttgagggtgacttaaaactgtaatcatttagctttggaaataaactttgtggagaggaaattaatattaacttaaaatgctggaaaaagcataaagaaatcaatccatacctacaaagtgtatttcttgaaatcttgcttatgatattttcctctaagatatatatctatataaaactaatttgaaaataataaattccccactatattttaacaaatatttttaggtattttgtttaaaatccttgactgttaggctgcattgtctgttttgcttctttacaataacttgtgcttgaggaatacagacctgctaaggttgattgggtgaaagccattacatttggcaaagtgccttggataaatcaacgaattcctgaaggcctggcctttagattcaaacctctgttagcacgtaagaaggaagcaacgtgtcatttctgagtgacatgttgtcccaagaagacataacatccagctccattctaccacctaaaaatggctcttgcgagctctcttatctcctgccccccctcaacccgtatcttcctgtccccattaaactctaatgctttatctggtatgagtgagaaacaaatggtactcagcagaaacctagataactgataagtcaaggtcagtggtcccaaagagagcccctttagttttctccttaaaagaaaaagacagctgaaaaaagcagatttcacaaaatgggaaatggaaaacatattgtatgcatttaaaatgggtgatttgaatgcaaaggaaatcccttttgcccttagttctctctttctccactatgagggcatgaaactttagaaggtaccgagagggccataagacatgagaaagtttccaactattccaaatcattatccatatgtggattttaaaaaccgttattcctatgagattgttttttaatttctaaggctccatagggcattctttgtcttatatcctgtattcctcctttgtttggatgttataaagcagtacttaaactctatagttcattctgatgaatagttttatttactcaggaatatgatcttcatctcaaaagaactagatgtagcatttgatacaaaggtcaccactgctatattgcttacaaattacgaatttaatagcacttctgtcttcctctttacccctaccatccatataggactagtgtgaaagaaagacctgttcttctggcaggttgaatataaaacactggagtttttgtttaaatgaaaatcgtttcatttttcatttctgaaatcaaaccaatggcctctcagtggttcaattaatgcatatgaaaacttgatggaagctgtaacttactactgctgttacgttattctttaggaaatatgatattttaaaatacattttcaatttaccacattctatgctaaaatattttaaactaaaattttctatctatcaaagattatagccaatcatcaagtaattaagagaatctgtaatataagtcaacaagtcaagaagatcaaaaagaagaaaaactgtgatccctgctctgtcctatgtagttgtgggttcagtgagaggtatgctttcaaaaaacaatcattaataaattatgaagaaatcaccatttagactgccctctagtgtttgtaaattcaaacccagattggatgtgaagcagtgaagagaccagagaacacataacccatgtcactgagtatccactgctggctccagccaatattttccaagtaggactgtggtccttgatttgccaattcttctggattctccaaaatgtcagttcaggttttgtattgaaatctatccatttatcaatgttggcccctaactccatttttaaatataacgttctgtgaaccaaactaaaaacatctgcaggccagatgtggccaaaaagctatcagtttgcaagccctattctagattagtgacttctaaccttgtttactatcagcaactttcaattattcatggcttctgcatttaacattcatccctatatatctccctctcccttctacttatttgctggggtgtgatgggctcttcaatacaatgtttcccaaaaaaacgccacttagtctgtggaaatatacttctctaagcacataatcacgattcaaagttataataaaccctatgacatatctgtaggatacaatttggtgaggatgagaacagtcaaatagatacacaattgaaagaactgtaagtaaaatattaatagtgaattcctctgagtagtgagaggatgagtacatttaaaaagataaatatctgtgttttggcaataaattaatattatatatatattcattgcaagagttttcaattacttagcctttttggctatgatcaagtgaaagagttttcagagtacgtttctctgggtggtgaaggagagggatgtatggggaagaaagtattagaagaaaatttattttttctgaaagaaattgacaagattgatgatgttcatgccttttcaaacatgaatatgtatcttgccatttaaaaaaattataaatgttgtaagcataaaaactaatgtccatcaacaaataaatacaatttaattatttttctttttatgcttacaatccactttgacaagttggaaaaaaaatgtgttttgtctcagaaaacccagaagagaatgtccacagagtgaacagacctatcccgtggaaattcacattcactaattcagattgtgtttactcctccaagcttcaccaccttcttcccaaaattaaatgaccacatctttataaaacagtgttaactgttatttcacaggcatttaaaaacatttgaataaattatggcacacagatgaatgcagatggttaagaataaaaattgtattcattttcaagttgactattaaatttctttttaaatttaccctttatttttctttcaagagaacctcctgctacttttctgtctcacagtcatatcttttctatcttttcttttactgttttgccttttctttcctcatttttcgttatttttccacttatgggtggattttgactacaagtgacaaaatgcctaagagtgattttaacaaacagaattaatttttctttttctttttttttttttgtttttttgttttttcttgagaagagtctccctctgtcgcccaggctggagtgcagtggcgagatctcggctcactgcaagctccacctcctgggttcacgccattctcctgcctcagcctcccaagtagctgggactacaggcacccgccaccatacccggctaattttttgtatttttagtagagacagggtttcaccgtgttagccaggatggtctccatctcctgacctcatgatccacccacctcagcctcccaaaatgctgggattacattgtaagccactgcacccggccaaacagaattattttttctcaaaaaacgagaagtcaaaagattggcattttctagcattagtttgactgttctgagatgccatcaggacctcatatctttccattctctcactccaccattataacagtgctgactttcatcttcatgtttgttactgcatggttgcaagctccagttcatgctacaacttcagatattgcatcaatattataatgtagaagaaatgtgaaaagcagtactagacactctgtcctttcatcaagaaagataaagctttcccagaatccctaggaaacattcactttgattttattggttacatataaccattcaaaccattagaactataaatgtcacatggtcaaacctagctgcaaaggaagctggaaaagagaatatacacctgaagatattgttgcatcatataaaatccaggatttgttcacataagaagaggaaagtatatattggataagcaactaacagtacttgccacaatgacctactcaaagggtagcaaatattgcctatttttatatattcactaattcaattgggctaacagaggacccagtaagacccttacataactatttgaaaaataaatttaaataatctctaattagtataatgggtgttcttagtgcagtgggtacttttaaagtgctttgtggcttttgatgaaaattgtcttagtatttaaaactttttcttacccaattttttgttcccatcgaattagcaatgctgtaaagaaaggcatcttattccattttttgttgctataaaggaatacttgaggctgggtaatttataaagatgaaaagtttatttggctcgcaattctggatggctggaaggttaagtactgggccacagcatctggtgggggcctcgagctgcttctagtcataatggaaggtgaagggtgtaaagatcatgtgacaagggaggaaagaagagaaggaaggaggtgctggttctttctatcaaccaattcgcaagagaactaatagagaaagaactcacttagccctgtgggaacacattaatctattcataagggatctggctgtatgatacaaacacctcccattaggccccacctccaaattgtatcccattggggatcaaatttcaaaaagagatttggaaggaacaaacaaaccatatctaagccatagtaaaaggaatggcttttcaaaggtaaaatttactaagtgtattaatattttaccaatttccagccaggagagtatgaatgttgcattattacattgctttgaaacaaagcattagtcttaattcagaagtttaaattcagatgttaacgttgcatatttaataatgcacaaccagtactaaaatcctcattgaaatgacaaataattttatttcgaatcccttatagaggttcacaatgttttaacaatgtagttttgactaaatagaagtagtcaaaacctgtcagattggaaatagtatttataaaacataaacaactcgtagtaggatcccacattgccaaaaataataataatgatgatttcaaacaatcctgatcttctgatttgcaagattggtaaattctttcaggaaagaaattgcttaactcagaagttcccacggttgcttttctattctaaatcttctgggatgtagagatgtcaagattgtgaaagagtttaaatcacttttttctcccacttatgccatacatcttaacttttctctcttccttcaggtcttctctgtgctatgcagattgttccttacctctctcccttcatcctttctttttccttgtcaccttaccaatctaccaattgtttcccttttgaatttccttgaagattgctccgggtctctctcagagagtggtgcccctgcctgggccttgcttggctcctggctcactgctgggcttgctccacccactcagcctggctggctgcactcagcttgtgccactggctgggattctgcacctgccatggttctgtgctcagcctgcggctggcctgggcatgctgtgaccatctttcaccttggatgctggcgtctggatgaggaggatgcagcagtgccccaaaactaggagatgccagcaactgcagaaccccaaggggtgttatggctcttgcctggggagtcctgaggtctgagtccaaaaggggcattaccgctgtctctccttcctgctgcccacagtgccacgagcaggagggacgtttcagttcatttgtgtttcagctcgttcagtgcaacccagctacagcccatggctcctggactggcccagccccaccactgcttcccatcatatatgtggtgcagccacccagtattggtggaaggcatgagaactacagtgttacagcaccttttgcacccactgttcagtgggtcctgggttcttgtctcatgtccaaggagaatgagattatgtggacaaccagagagtgagcaaggcagaggagggttttcttgagcaacagaacagctcttgatacaagatgggacctgaagtgcatagtccctacccaaaggtgggtagtctcaatgtgtcactgagtctggggtttttatgggctcagaagggggaagtgtgtgttgattggtccatggcctggaaaaagcaccattcagttggctaaaaggcattaaggaagctctcactccagttgtggactctggcagctcagtttttaggctttaagctgtctttggctagaaggtctggtttcaccagggacctgccctgtctgcctagaaatttgtctgcctcctgatgctatcaatttccagttccagaaaaaaaaaaaaaaactttcaaaatcagcaaattctaattttcaagccattagattccttctcactttttctgttaaattacttgatatgtttcaggaattgaactttaattagtcattaaagtgattactgttcttcagccctggctgactcaattatggcaacctatttcttagtgacctttttctgcctaaattaagcaaaacataaacaggatccatgtattacatcagggaaagaatatgtgaataaactaaacaaaaaagtatctagttctcatatttgagacatttttactctcagaaagtcaatgttgtgcctttagtctctgcttttatgatgcaggaatgtggagagtgatgggcaggggtgaagtattcaggtagctacacaattgactcacattaccagaactaagttggaaccataatgttttcaagaggtttttgagttaaggtctgaattgctaccgtttcacctcagcagaactgaacacttacttaattttatgtgtaatttcattaaatagcacttaatacctacaataaactatgttggaaatggctaagcagagagataaatttaaggcagcttatgactttatcattatcaggtacaaaggaagaagactatttctttatatataattgaatttacattttatgccataacagtcgaaatgagaattgttagtcatttaaagaggcactttaaagattaacttaatgacacatattttgactatttaaagaggcctaaaagaacaaaggggagttttatttggaaaaatctcttacttctttgtagccattatcagaatgtattaatggggctttgtgctggataaataggtttgtgtgggtggctgtggggagggaagtgaggtggcatttactcagcggcctttcattttctaaaattgaaaattctatcagttaccataaattaagtttaatttaaatcatttggtatcaaatatctaaaaacaataactaaacttaaaaggagaaaaagataaaatgagagtaagaaaaagtggcaaagagctgaaaactcttctaaagcaaaatcccagactgaaattataaatctcttaaagcagtgttttggtaatttgggttattactcatgcaccagccaagctctgaattacaagggcgtgtagacagcactctgcctcggggttatgcagcgagatctgttccccttggttctgctggctgtgaagagttctggctggtgaagaggcaccaaaagaatcctgtgtcaaaatgactttagatataatctagagcagactcctcactttgtaatgactgaaatgcagagaggcagagacatgcttgcagtctcaagctgttcactgccaaatccagacttgaatgagggtcattttcccacagacttcccactgaagcttgaggcctctgacataatatctaagcatttttcagtagctactatttggactagataatatattcagggtgatttttaaagttgaccattttccttcataggtgagaaattaaacggtatggaaatgataattacctttcaagtagtttttaactaagagaatgtatataataatattaatgtgaataaatatccaaagccaaggtgtttccaagagtatgtgtgacaagtattcagaactaataagaatactcaaattaatgttaatgtctctctctgttggtttatgacttgccaaatgtgaattatctcctcaaatacacacgtgaattggctgctgatgattatttgacaggacacattttacctgcagcaacattcaacattttactacccacggcattatctgaaagataatcaatactttttgctaaagctccaggcactagacgctaatcatatgcaacactgctagacagaaaacataaagtcagatttacatgtttctggcactctttaaaatgatagtagggttgtgattatcaggtaagatttgctattgaaccatgaggttttggattatctgttaggacatgggagtttcagcaaacattgattgtgcttctgatattttcacacttaatgagatggtcgatgtcaggttaagtaaaagaatgactgagaactccattttggctcagaaaggcagaaaaaggtaaaagaaagagaacttaacagtagaaaccatctaagtggcttcttacttttggttcaatctaataaataagaacttgaacaggaaactcatatcaatccaaagattcaaacttaccctgatataaggagacttttagaccaagagaagaaagcttatctgtgattaaattgaaatttgcttgggataattattcgccatcagtcacacaatttagacctaaaattcacagatgcaggaaaccaggattacattatctttcccaaattacagtatcttttcagtttcttatttagttactgaactattatagaatagttgattgtaaatgcttctgagaacttaaaaattacatcctttctctcaattatgtgtttttaaacttgactcttgggattagtgaagctattatgatcacatttcacagagatgacaaagacaggaagctaatatgctaacatgaaagattaactttaattatattcttctatggcttgtgtattttttaaatatagacattcatgttgcatctatctacatttatgttgcatctatatgtcatccagactcagtcaacaattcacttctttaaactattagcaataaactaaagcatttgttagcatgctgtttgatttacattttaaacctaattctccatccaacactttaatgtaaaaactgagcactgaaataaacagcattagtttttccttgctaaaataacaagtttgcctttaaaattatttactgttgtaacctgtgaattaatgtgccttgtaaatatgcctcgttaactgattaatgaaatgtttataattgcaaattgtaagttagattgaggcagatgaatagataagtgcatctatttgaaatgtacttcctattgaattcacctaggccttatgtggggcttcgttaataataaattttcaggtaattcagggtgattttctgccctgtgcccagatcgtactcactgccagctttagtgactgaaatgagcatcgttctccacctctaccttcaccacattaactcaaaattgatgtttttgctcatttttccagaatggtgcaatcagcaggtgatcacctcaggaagaaaaccaatgtctttattccaattgtttttatttttcccagactcctaacaactatggcttgtggaaacatatggcctatacactcactatgaatgttcgttgaatttcatgaatattcctcccttttgcacctattttcttaataatccctttgagacttcagccctcatttgtttacttagcatacatgccataagggccggctaaacacagccatgacaggatgttccgcaggaaagcctgttctacacgagagacagataaacatgacatttcattgaatgcaacagaaagagtactgacctggtgttttgaacaaaagaagcaacgattactcgagtggaaggaggagaggtcgtttgaaatggttttaaagattaagtggaattttctcaaatgtttcaggttgacatagcattttaggcaaaagggaaaatttgaagaaataacatggaggttaatttctctttcttaaaatttaacataagtcaaactatgtcatgacacctactcagaaaattgggtaaattaaaaatcattcctaatgaagatactgaaaaaaaaattttaattggtatcagaaaaataaaaggtaaataatgcagatagaaaagatcctcttgggagaaagcaagtagataaaacaaaaaataccttggtgttgaacacttcaaatgaatttaaaatttctttttttaactttttttataatgttaactttttttgtttttttagattcagtgggtacacatgcaagtgtgctatatgggtatatggcatgatgctgaggtttcaggtatgaatgcggtcccgagcagagtacccagtaggtagtttttcaatacttgccccttcctcctctgccccttctagcagtcctcagtgtctgttgctacctctttatgtccatgagtactcagcgtttatctcctacttacaagggagaacatcaggtatttctgttcctgtgttaatttgcttagaacaatggccccaactgaatccatgtctctacaaaggacgtgaatttgatcgtttttatggctaagtagcattccatggtgtctatgtccacattgtctttatccaatccactgttgatgggcacctacattatgtcttttctattgtgaatagtgctgcaatgaacatataagggcatgtgtctttttgatagaatgatttattttcctttaaatatatacccagtaatgggattgttgggtcaaatggtagttttgttttaaattctttgagaaatctccaaacagcattccaaagtggctgaaataatttacagtcccaccaacagtgtataagcattcccttttctccacagcctcaccagcatctgctattttttgacttttcttttcttttcttttttttttttttttttttttgagacaccgtcttcctctgtcgcccagactggagtgcagtggcatgatcttgcctcactgcaacctccgcctcccgggttcaagtgattctcctgcctcagcctcccaagtagctgggattacaggcacgtaccaacacacctggctaatttttgtatttttagtagagacggggttttgccatgttggccaggctggtctcaaactcctgacctcaagtgatcctcctgccccagcctcccaaggtactgggattacaggtgtgagccactgtgcccggccatatttttttgtctttttaataatagccattctgactgatgtgagatagtgtctcattgtggtttttatatgcatttctttgataattattgatgttgagcattttttcatgtttgtgggctgcttgtatgtcatcttttgagaagcatctgctcattttgtgctcatttttaatgaagtgatttggtttttgcttattgaattgtttatgttccttatggattctggatattagattttgtcagaaccatagcttatgaatatttttcccattttataggctgcttactgtgttgatagtatcttttgctgtacagaagttctttactttaattaggtccttcttgtcaatttttgttttgttgcaattgctttggaattaattattcctagtcataaattatttcccagggctaatgtccagaatggagtttcctaggatttttttttagaattcctatagtttgaggtcttatacttaaatctttaatccatcctaagttaatttttatatatggtgaaaggtaggggtccagtttcattcttctgcatggctagctcattatccctgcaccatttattgaacagggaatcctttctctattgcttgttttcatcaactttgctgaagatcagatgactgtgggtgtgcagctttatttctgcttttcctgttttgttccattggtctatgtgtctgtttttgtatcagtaccatgttgttttagttactgtagcttcataaaaatagtgtgaaatcagataatgtgatgcttccagctttgttctttttgcttcagattgctttatctatttgggctcctctttggttcctataaaatttaaaatagtttttttctaattctgtaaaatatgaccttggaagtttgataggaatagtgttgaatctgtagactgctttaggccatatgtccattttaataacattgacttttctaattcatgagcatagaatatttttccatttatttgtgtactctgtggtgtctttcagcggtgttttgtataatattctccttacagacatctttcaccttcttggttagatgtattcctaggtaacttagttttttgtggctattgtaaataggattgcattcttgatttgactcttagcttgaacaccattggtgtatagaaatgctactgatttttgtactttgcttttatatcctgaaacttttttctcatttgtctgaatcatctaggatttgttttagcagtgtcttgtagtccctttgtagagatccttcacctcctgggttagatgtattcctggatatttgcttacgtttttggtagctattgtaaatgggattgtattcttgatttggctctcatctcgaacattactgatgtatagaaatgctactgatttttgtacattgatttttgtgttctgaaactttactgcaattgttcatcacttccagtagccttttggtggagtctttatgattttctaggtatagaattatatgtcagcaaagatagtttggtctcttcttttcttacttggatgcattttatttctttctcttttctgagggctttagctaggactctgagtactatgttgaatgggagtggtgagagtgggcatccttgtcttgtttcagttcttcaggggaatgcttccagcttttcccatttggtatgatgttggttgtaggtttttcatagatgggtcttcttattttcggatatgttcctttgatgattggttttgtgagggctttgttcatgaagggatgttggattttatcaaatttcaaatgtgttctaaagcaagagatggatacagttcagggtatgtagctatttacttttgtgcccattatagctttgtgacactctggaatttttcataaatttaccttgcctttcttgaaatatgcctacaaaggaatattgaagaaagtcataggatgtttgtgaaaagagtataaagtgtgtgggaaggacgggagagagttgcacctaattgataaaggttttctctgaaataaattcaaaaactggttacaaatgttatgaaacttgcttaaataaagaagacttgagtttgaatctgggtgctttccatatccttgacttgagcccttgagtaaagtataattctatgtatttaaaaaaacaataataatacctgtcatacccaatttcctcggtcagttaagtatttattatgcactctactcatttgtacattctaactgagccttataataggtaagtgtggtatgtgtatacactctagatcagagacatctagtaccccacagatgagtaacaaccttcaaatattcaccaagagcctgcaggataatccagtagaccctaccttaccataatctgtgtctgtattttgcaactcatgatcccttaatctcaactttgactctaactcccttgccttcaaagtccaaatgggcatgtttctccatgtctgtccttactttctatctcaccctcttgccatgcacccaaagctgaggaaagagattcacacctcatctcactccaaaccacatcccagttggggcaataggtacagagctgctgtggagtggtcagaaaactacagaatgacaggggccacaggtcctaaaatggtcacatcccaggagctcattttctaattggtgacatataaacaaataattataatttatggatttgacattcatgttttcaaaatatatatctaaggagaatgtggatgaagtaattatgaatgaattgcttctgagagggaggagaggtgtcaggactccaggtcaaggaagtaaaagtgccaaagcaccagggcaaagaacattgtgtgtacaagcaactgaatacattcttctgataaggacaaaacagataattcctacaattattttctccaagtaagtatttggggaaaaaaatgggttgggacattagttaggagatcaaattactgtacagaattacagtagcagatgagatgaatagatcattgacaagatgaaagattaccaaatgactttctttcagaatgcaaccaagattaaaaatttaaagactgttcatggttttgtaatttctccagcatcacttattaatataagaatcaaagactaggacagaggataggcaggaacaatgaggtcagaggccagatttaatagaggataatgaaaaagattagtaaaaatataggaactggggacagggagaggtttcttgtttcaaattatgtgaatatggatgcaccttataggctctaacaccctgcgcagatgggaggtattgttttcattattagtccaataatgtatatatgttttcttaaatcacttcgaaaacagctataggtgacaaccaggtaaggaaagaacatacataggacatgtgcgtgcattccagttcaacaaaaccttacaaagtgtctagaattaagacctacaacttattctagagaagcttattatctaccacaggagacaaatataagcagagaattccaaactaatatgccaagaactacataaaaagtgaggatatgcatttagtccaatcttcctagaggagatgatgctgaggaaattttaaaatataggtaggatttggtcagaaagctagaaggacatttcaggcagagggaactgcatgagaaaaggccaggagactggcaagagcatttagctaagttactgaatccaagaaatactttgcactatatattcatactgtttataagatggagaaaagcctagaagaaggaacatcataaattattgttcaggacatcttcacttctctgcttcttccctccgggaatatagtatatttcactgtcccactgattttaggattagccatatgattaactgtgacctacggaatgttagcagaaggagtgtgaaaacatgaattgtgcttgcctgatggctacttgctctctttcccctctgccagtgcacgaagatcatgctctgactagcccactgccccaaggagaatggaaaacatggggaaaagtccatctaacccacagacttgaggtctggaagcaaacccagctaagtctagcctagatctgctcaccctaagctggctggtagacatgtgagtgatttaaatgattcatattttaaacctcccaatgttagagcagatgttatgcagcaacagctgcctatacgttgctgaacatagctgtctgttgaaggaatacaaatatttttgaatttattatattttgcttcacagtatctgcaaatttgttgattacttttgtattaaagagaattctacaaaataaatcatatatataaaatattatttatgaagtgagaatgtctctaaaattatgtgttatatttcctcttaaacaattgtcagtcattaactttatcttcgtttgaatgaattttgttgtgtacacttaatgtataaaacatgatgttatgagatacatatagatagtaaaatagttattagagtgaagcaaattaacattatctcacataagtattcatttccccccacccacccatggcaagagcaactataatctaatcgcttagcaaaaatcccaaatacaatactctattattaactatagtcctcatttgtacattagatctttaggttcattaactttaccttgagggttgttttatgtgactgtaccgtcattatcaattgtctttgatagcccacaggtggtgaactaaaatcttctttattcctaagccttcttttcagtacattgttttggttactgtctcaggaaaagagaaggcccagggtgggaagcagaaaaaaacaagttttagctacagggagatttgatttaatatacttagacaattatataaaagtccttactaccgtggctgatgtatagtaatagatgattaagaagtatttagttcattctcacagcctcccctattcccattagccagttttggaaaatctccctttaaggttttcaagttcatgatcatttgcattttgatgatggccaaggtaaatcgagctgtttctgtattggtgcaattaagagaaaaaaagtcagaacaatcctggctttttggattttgatgaaattttcagtctgttttgacatttgagtttctgattttctgtgatctgtcatttatgagtgctgcaatgaataagtgagagctattaaacagctgcacaatttgggggacttttcacagcccagttgtaggactcagcaggagatcagtaaggattagacacaaagaaacaggcattttaatttgagtaatattaacattcacaaactgtcatattatggaaatcactgggagtgtgtgtgctctgctattgaagcaaaggcagaaaaaacaacaagaggagcttagaatttgcaagatgtcctcaatggctggaagatgatacagtcaggtgagcctgaaaagtggcattcgggaggaacaaatttgggactgaaggagacacttaggggaatcccctgaaaacttccggttctccaaagcacctttgtcctattaaaagacctctctgtgaagaggctgctatatcctggtcctgggcagtaagctagcaatgtttctttattgaggaaaggacagtttggagacacaaggaagtataagaaatccatgacaccgttcctcacttcagggattctcgaaactatttatacacacaggaacctacactgaaacaacaactgaagtacacatgagggaataccatgtaagcaaacttaatacaatcagtatagcttaatctagctcaaatttcattttagaattttgtagcagtaaagttatcaaaaatatcaagccaggctacttatgaataaccccttgtaagaaatcaactttgagatgagttttgacaaaagcgaaggataaggattggtgtagacggtgaaaaatgcgtgaacaagaaaatgataataataagagcatttctaatagtgcgaagacaaaaccagagggtgcaaagaaggaaaaaaaaagatgtaaatgcgacaaaatcaatcttgtgcaacctcacacattggtgatacaggtttaagcttttgtgagggcccagtgaccactaatctggtaacacctctgctaaatgcaatctcttctctgccctgtaacttctgaaatcaaaaactcatgtacaattccacaggggagacccacttagaagcagaattgaaggtcgccagagttatatggtagatatgaggtgtggtaaggggtcaaaatgacaataactggactattctgactggtgaggcgccaattaacgacacccatcttttaattgtagtttactggtaagatcatcgagaaaggagagctcatgtctactgttttgtaatatatatgaagagaacactgtaaataaccttctcttaatctcacaaaaatccctctcctccccacaccagcatgaaaaatcagcttcatccccatgcacaatagccaccaaagtaaaacaagcctttctagttgataacgaaagagaatatagtttgctcctgaacttacccaaaagaagtgctgaaaaattgtgaatatataaaattctgataaaccctttctgtatttccagtttaattttatgatgatatcagttcttttgtctttattttctattattgtttactcatccctcagcattttggactttagggtctttgtctcttatgagctggaaaatcatcatttgacacctgatgcttaaataaacctgaagaggagtcattaaaggaatctctccaaaatgctaagactcactgatatatgtatcaaagagtgagatttctaagaattaaacatatccttcttttctttattttattattactttcatcattatgtttgggattctctgatattagtatgtacttattgaaggcagatgcttatattcttcaatattcttcaatctaatgatatatgaagcagcaaagttattaagcatgttcatgaaggagaaatacaagcagtgccaaaacagtcttggaaaatagaattgacctttctaatttttgcaatctatccatctgacaaaggtctaatatccataatctacaaggaatttaaacaaatttaaaaaaaacgttaaaaacttggcaaaggacatgaatagacacttctcaaaaaagacatggcatttatgcagccaacaaacatatgaaaaaaagctcaacatcactgatcattagagaaatgaaaatcaaaaccacaatgaaataccatctcacgccaatcagaatgacgattattaaaaagtcaagaaacaacaggtgctggcaaagttgtgaagaattacgaatgcttttaaactgttggtaggaaagaatgcaaattagttcaaccattgtggaagatggcgtggcaattcctcaaagatctagaaccagaaataccatttgacccagcaatcccattactgggtatatacccaaaggaatataaatcattctattacaaagatacatgcacatgtctgttccttgaagccctattcacaatagcaaagacatagaatcaacccaaatgcccatcaatgatagactggataaagaaaatgtggtacctatacaccatggaatactatgcagccataaaaaggaatgagataatgtgctttgcagggacgtagatggagcttgaagccattatgcccagcaaactaacacaggaacagaaaaccaaacaccacgtgttctcatgtataagtgggaactgaacaatgagaatacatggacacaggaaggagaacaaaacacactggggcctgtcaggaggtggggtagggggagggagggcattaggaaaaataggtaatgcacgcttggcttaatacctaggtgatgggttgataggtgcagcaaaccaccatggcacatgtttacctatgtaacaaacctgcacattctgtacacgtacctcagaacttaaagtaaaattttttaaataacatttttatagtttaatgatttctgaaaattaataaagcttctatatcctggaaaaagtaccacctctcatacttcagagtaaaatatattcttagtaaaaaaaaatctattacttcagaaaacttaagtagtgaggctagaaagacagcgatttaggagagaggagtcattattcaagaaattttgcgacagtaatcacagagtatcagtggcaagatgtacagtgggataggagacagaaagggaatatggcagagtagaataaagtcaagaagaaggaataacaagatgaaatgacataacaagatggtaacaataacagtatcaaattatgattctgttttgtggggtgagttttcctggccagacccctgtccttcccctaggaacttctcccacaagtacttctgccctgacctcacctgcacatcacttctgtgttaggttccatgcatcctgctctgatgataacaatcccttgccttatggtttcgagagatcttggattattgattaattggccagaatttatactcttcagttaacaatcccatatattctgtgaggccttatgtttctttcagtcactgccatataaaattccctgctcaaatcacctcagccttttttttgtatttcttcttttctttcccctttctttggccctgaatttctacacacatttcaagctctatacctttgatttcgccctttctcccaagtacaattattcatttttcacaaacctaaatcctccactactttcagagaaatgtagaaaatactagccaaattttctctgtctccttgttcaaattcctagttcagtgggtatacaagctcatgctgaccaacctacattcatgggtctgtttcgcatcccattcattctgtcttggagagaaggaagagagttctacgtgcgtatgtgtatgtgtgttgggggagtatcccgtctctacatggggctgctatttagtcaaatctctaggtgtgaggttctcacatagacaggactgtgggctattagtgttcttacccataactcaaaacctttgctttttatgtttctgtgcctttacacagggtatcagctccttgactcttacctcttttcagttagtagagaaacgcttttcctctaaatcagtttgccacatcggggtaatgatgaagaaatgaattcagttctttctatgaagtaccatatccaggatcatgtagaatttccataacggaggaaggcatacatattgtttctagagataatacattttggctggatataaaagcgccatcaaccttaatcttgaaaaattctggtttggagccaacgaccttatagtattgtgcctggtttaatccaaccaggcagtgagacagattataacctctcacttggatttttcttatttttcagtgaagctcaaatgccttccaaggaatgctgagcattaacaaatgatcaatatatattattatttccaaaaaaagtacttgtaagcatcatacacatctttcctttaagtaatatatttttaactttctttatgattcttctataggctggaatgcctgtctgcattagtaacaaataggaggtgtttgtctgaacataattgtcaagtcaggccttccccacatatactttgaaaagcccagtatctattgattttatgttttgcagcatcttcactttcctaccccaagcaagtcttccctcatgagacttgtagaaatttcagttaaactttttggttttacattgctgtaaatgctcgaatacgtaatatgttacttgttttctcccatcaaaacctattttcctgcacatctattaaatgtatatcaaagccaatttgtttcattccaaagttagctttaaatttaatcttgataaggcacattgtttttagtcaaatcaggctgtgataacaaaatgccatcgatggaatggcttataaataatggaaatttatttcatttatttcacgcagttctggaggctggaagtccaagaacagggtacagcgtgattggtttctgaagagtggcctcttctgggttgcagacctttgcctaactgttgtattctcacatggtgaaaagagggcttgaaagctctctggggtcctttatattaggccactaatcccattaatgagggctctgctctcatgacctaattacctcccaaaggccgtaactcttaatattgcatgttggaggttaggattttaatatatgaatttgggggaatgcagcccattacatacaaagcacttttagaggaaatacctttttctccaggagaattttctgatttattttttaaaatttttagtactttgattctcatattttctcattattttaatagtgtctatgatgtaggctacagcatagtcttcctaccagttagatgatcctttacatcttataggtaaaatctcagaattatgctatattgtcataaagggacaatggagttttggagccactaaggcactcttatgccttatctaatttaaattgatgagttagtttctcctacaaattctctatggcatactagaaattacattaaattgtaagtcaaaccccaatgatttggctacaattaagaaagcccactcacaccactaaagtgtgtgacacagaatattgtttcatctttgtgtaattgtaaaattggaaagaatcttagatgtcctccagcccagaggtttcaatcccttctccccagggacttcagggggtatattctttcctagggaggggctggtgttgagaagatgcaactttcctcccctaactccatttaatcagaggccactaattcgttctgttttacaaattggtacaatctgagtatcttccccaattctctgtctctgttcttcagcatgagaggctgtgtatcagataatattttttactcagttaaagcatctgaatccccaccctgaatgactataagaaaaatccatttggaatcatgtttctctatcttagtattttcaagaatttccagaggatgcttacatatctcacaattgtgctgtggttttgatttactgtcttatcatagacatctcctccaaactatgacttctttcaacataactctatctcaaacatggattcagtgcagtctcagtacttctgaaagtaaacactgagaatactgtttaacaaaactttactaaaggtttgtgagccattgagttttccaagcctcccaaagacattccaagggcatgttagcaccatatgttagtgttcttgacagtgtgttaaatgctgtatcctgaaaaagcatatccataaattttcccttttctggctttatttcccacccctcttaatcttccatcctgagaatgtaatcccaatatcctatcccatgtattttacattctctttccagtacatctgagctaggtcttgtatctcaggtctccactagtgcaataatacacttagttatttggcttaactttagttaattgtcttagtggccaggacatacggtagacacaaatgctgagggggacatctgctgtcttacgcggtagtgcctctgtgtcaccttcaagccaggctactcttaaaggagtggtgggcacttctgcaggctcaaagggtccaggaaatctgaggggaccagattttcaaatgcatcaaacaagtgtcttcatccaataactttgggtctcatttattgcagccagggccctactcttgtcatggcagacctaactagttggggaattttactttctctggaggtctgctgtccttagttcctgagcctgatcctcagccttttctgtcctccagctgcaagaaataggaatctctctttgtgtttccaaagagttcctttggctttcacatttagccttttattgatggttaatctttttcagtctttcatttttgcttcccacagcattaattgcccccagcaagtactgtccaataccattgcccttataataactacttgcctcatttacctctaaagattaataccccgtacctaatattgcatttccttctaccagtatagcatcccagtttacctatgatgaaagctttataatttccatcttgtgtcacagaatctttgttctctacctcattgtccactgaataatgggtgatccagcttcaaaatctcatttaacctctccattttcagaccattctcagatcaactgtcaggcctacttctgtagtaagtaggctcagatgacatttagaaaattgagggttcattaagaaatgctcttgggatcaacaactgtgggagaaggaaacaaaagcaaattgaggtggtgtgtgaaatcacaacaagccctcagccaaatttacaggatgctctgaagctggcaaatatcttcagaattaaagaaaggggtcaagcctttaatatgccatgattaaccagtcattggttgcaagctaccacctctcccacagggaacccaatcccagagaaggggtatgatcttgaatgaggcagctactgtccatcgaggacaagtttccaaatgggtagacagctaagaaattttaaccctcaacctttgggataactgaggaataaatcctttagtcttaaagtggagatctgagtggcaaaggccgccctccattgcagaaggattaagtactgatgaggacatgtctaaaagatgcaggaaccagtttgaaagaggctcactagttaatttttggctaatgtaaatatcaaaaagaataatgatgacagtgagttttcaaatattgaatgagaaaataatttgactaaatatattctgaatacgtttagtatatccatcggtgtcctgaaaagaagagtggatggaagctcttttttgtagaataatgccagttccttaatgtgaaatgaccaaattaaaagaactagatcattttcaaacatcaatgtatgaattgatttagttatcaatagttgcaaaaacctttagctgataatttgttgaggatcaggatttcacatacattacaaagtatcaacatacagaatacacattaatgacaaaggggaagaaaacacctttacaatgggggggtgttgtagatactaccttaaccgagagatcaaacttgacatcaccaataagagaaggaaaaaaaaaacagacttcattagctttctaatttaatgcaatgggaagtacatctgtattattcttgacaaaatgtttaacttgagtctgatcataggaagcaatttgacaaatctggattgtgagtgagcttgtaagacaaccagcctggattatttaaaaatatcagaatcatgaaaacaaagtgtaaagagactgtcctaaattaaagatgtttttaaaaatgacaaatatactatgagatcattaatcagatcctgaattgaacataaaaatagctaaaaagaacattgtgggctcaactgagtaaatacgagtataaattatatatcagatattactgtatcaatattaaattttctgagttcgatcatgcatttgtgattatatcatggctacctactaaaatactaaaggaccaagtgttgatattaccaatgtactttgcaaagaatttcttgaaaaaagacatggagagagatggcaaagtgttaacaactggtgaattgttaacataagtaaagtttctacaggtatttataatattattcttttaattttctattagttttattttttaaaaatatatatataggggaaaattctaaagttaaatttaacccaagtcctaatctaatgtctgcaaatctattaataagatctgtgttcatgaactttaactgtgttttgaattccgattacagccttctctataccaagccttttctttctagcattacaagcaaagtggtttttaagaaaaaacacataaagataccacatttgttttaactatgtttctatgactccgatccaggtcctttttttaacagttattttcaccctgacgaattcctacaactgtcaaaatgaaatctcaaccttattttcactaaatgttttctttttatatctcttatgtttcagaagactacttccattaactgagacttcttccattaactgaactgaaagaggagacttgaactactctctctctatatatatatacacacatatatacgtgtgtgtatatatatatatatatacacatatatatgtgtgtatatatatatacatatatatatatatatatatatatatatatgctttttaataaaactttgtagctgggtatggtggccatgcctgtagtcccagctgtttgggaggctgaggttggaggattttgagtttgagtccagcctgggcaacatagggaaaccccacctcttaagaaagaaaaaaaaaacagttttctttcaatttcctattatgataaatattttttcccttctcattacctcattccctcagaatcacatatcaaacctgtttttgggaaaaaatgtaaaattgaagttctatgtcagccaatcttcagaaggattagggaaaaatagaacacaaatatatctcaaagtatatccagtaggacccaaataaactaatgcctagcttaaagagaagagctaaccctgtgtcttaccatttttcagagctatgggacagtcatttaaggaatatgtctctcatttcctacatttacaggctttactattcttacagaaaaaaaaatcaaaataatataaacacattcataaagcttcaacctcatagatatgtatgcaatcttggaagcatcttctcttaacttcaggttttcaattatttcaaaagtgaacatttaccttctccagtgcagtttctgaaacaacagctcttcaatagaactcaagtagattttaacaagtatgtattcctttggttgttttttcctttgctttctctcatctctcaaatgtcttagtacctatagactcatatattaaaatatatgcacataattataaacctttaaaatgtacttttataaaggcactcctagcacaatgcataaaacaggtgagctatttttaatttcatcatgggaaatatgggaagttaacgtagaaggagataaaaaggatcccaagtcattgttttttattggaaaaacacactaggtgttttgtaaggagagaaaaatctctagagcattgaattgcaacagaacctttacgtaaagcagttttatttgaaatatattgttccagacagcagtgaaaaaaagaaaccagttttaatctaaaatgcttccaggctcagtctcctctggccaattaatttgatttcagcaatgttctggttgcctctgcttagcaatagctattaaatatagtgctgtgccttttggaaaacttttactttacataagagccaaaaggtaaatctgtggaaaattggactaggaagtgaaatatgattttgaaatggaaacatatattagctcaaactctgataaatgaggatcattttgaaaaaatataggtgacaacaagtgccagtcagcatccatcagccatcagtcacattttgacaaagactacgcaagcctcatttacctatctacttagctacctaggttttcaaatatttcttttttattttattcaagtttggggaagagatgccaacattttctgataacattaggattaacttcagtgagtattgattggaatgtaccagaataggcactcatataaaaatgattaagacacatataagatagtacatgccctttgggcaatctaatgtgtaaaattagggaaatcgtataatacaagaagaaataaagtgtattattccgttctcacattgctataaggaaatacctgagactgggttatttataaaggaaagagatttaattgactcacagttccacgtggctgggaaggcttcaggaaacttaacaatcctggtagaaggcgaagggaaagaaaggcaccctcttcacagggcggcaggaagcggaagtgccaagcaaagggggaaaagccctttatataaactctcagatctcctgagaactcactcattatcatgagaatagcatgggggtaattgcccccatgattcatttacctcccatcaggtccctcccacgacacatggggattgtgggaactgcaattcaacatgagatttggtggggggatacggacaaaccatatcataaggtgacagaactggttgtctatctcagcattaagtaatttaaacaacaaccagttatttagcttacaattcttatgagcagttgctggtctgtaccagcctttgctaatctggcctgggcttgcccatgtacctgtggcatttggaagttcagttgtggcctagttttagactgccttagtcacgtctttccatttggcaaatagcaataataactgcaactaggataattggggaggaagtcagttgaatgtgagagaattggaaatagaaagaataagcattttggatttcaagtttactctattataatataattagattagcttatttttaaatgagctatttttacactggttcattttatcccatcttggtcattttactgttgcctcaaacagtagtttctttcccctcctcctcccagaactagtatatataaagtcagattaagaccttacttatccatccaacatctcataacttctttaatttcttcaaatagcacatattcaaaactttcaaatatgatttgcctctttctttttcttcttcccttttcatattcaattagttgccaatatcttctaagtaccagctccagcatcgttttcccgcttctattcccactactttcaccatgtctcagactctctttgcttcttgcctggactgatgtaatatgtcccttgtcaggcttattatatccaggtttgctcttcacaatctacttactgcctgcaaatcagtcttcttaactcacagttctgatcgagccatttccttctgcacaaatttctatggttctcgattctcacctgaatttctcagcctagtattaaaagttttccaggcttagccccatttatgcttctaaacttatttcccactgttccaccaatgctgtgcatcagcccaattgaaagcttcaactttcttttaaaccccaagacatatttgatcattcctactgcatggaatattttccctggtctaaaaattcccagctatgacattcagctcatgttacttcccacatgaagccttttcaatcatcttaattggaaattcttatactctgaatcatattcatggttattccaccaaaatgatattcatttctattatagctatttaaatacataaaacacacattttgccttacttaggaggttatattttcctgaataaagtcacatgcttcactcagctctgacttcccccacaatgttttatttttttatttttattatttatttatttatttatttgagatggagtcttgctctgtcacccaggctggagtgcagtggcatcatcttggttcactgcaacctccacctcctgaattcaagctattctcctgcctcagcctcctgagtagctgggattacaggtatgctcccagctaatttttgtatttttagtagagacagggtttcaccatgttggataggctggtcttgaactcctgacctcaagtgatccacccacctcggcctcccaaagtgctaggattaccagcctgagccatcgcgcccagcccaatgttttactttaatattacacgtgaacatgaaaaattgttcatagtgtttggggaccattatacattatgaaaatggggatagaagataatttctagcaaggaagtaaacatattaaattttagataagagtcctgaaagaccaacatgtagactattttggtaaagaataaaaatacagcaagagggatcgatgttgaaaaggtctagaagacaaataaccaaagatgagggcttagaatgtggtattaagtcatagagcatcagagaagaggaagatattatgaatgttaaatcaacaaaacatgctgactactcaagaaaggctggccagatgtggtggctcatgcctgtaattctagcattttgggagtctgaggtgggtggagcaccttagatcgggaatttgagaccagcctggccaacatggtaaaaccccgtttctactaaaatacaaaattaggcaggcgtggtggtgtgtgcctgtaatcccagtgacttaggaggctgtggcaggagaatctctggaacccaggaggcggaggttgcagtgagccaagatcctgccattgcactccagcctgggcaacaagagcgaaactccatctcaaaaaaaaaaaaagaagaagaaggggaaggagaaggggaaggggaaggggagggggagggggagggaagggggagggggaagaagaagaagaagaagatgaggaggaggaggcagaggaggcagaggaggaggaggaggaagaggagaaaaagaaaggtgaacaaaatggatatttctggtttggggatctacagaatcagaggaaaaaaaacacaagtgtgtgatataaaaataataattagttcagttttaaacaccatgtagctatttattgttgcataatcatctcagaacatgacttaagacagtgaacatttattatctcacagtttctgtgggtcagaaatttaggagtactttcctgggtgattctgggtctgagccactcatgaggttgcaatcaagatactggtcaggactataggcatctgaaggattggctggaactgaagaatctgcttccaaactcactgctatgatttggatgcttgtaccttgcaaatctcatgttgacatttgatcaccaatgttggagttggggcctattggtacgtgtttgggttatgggagcagatccctcatgaatagattaacaccctctctgagggagtggtgagtgatttctaactctattagttcctgcaagagctagttatttaaaagagcctgtcaccttccccttctctctctttcttcttctcttggcaagtgatccctgcacgtgctagctcccctttgccttttaccatgagttgtagcaacctgaggctcttactggaagaagatactggtgccacgcttcttgttcagcctgcagaaatgtgagctgaataaaactcttttctttatacattacccagcctcaggtatttctttataacaacacaaatggactaagacattcacccatgtgaccgtggctggaggcctgctccttacctcatgaatctctccatagggttattggtgagtactaacaacatggcagctagcttacctcaagctagtgatccaagggagagcaaaaaggaagtgactatgcctgccatgacttagccagaagtcacacatcccttctgctatattccattcattagaagcaagttgctaagtccagctcacactcaaagggtatgacattaagcttcaactcttgaagggaggaatgtcaaaaatatgtggacatattttagaaacttcacagacatgttgagtttgagtttcgtgaggatacacagatggagatatccagtagctaggctacagtttagaatcaaaatctagaaaggagagcacacatttggaaatcattagctatttgtggaaatggaagctatgaatggtggaaattttagacaagcttgagatcattcagagactatgtgaaggctgaaaaggaagagaaccaaatgtggatgtatgagggagatttacacaaaaggcaaaagcagtgcaggagtcaactagtagggctgaaaagaaaaaaacagaatagttttcatttcttgtcataaaattcaagagaaaaatattgatttattcagaaaatattgtgtgcctcaacattgggtaacaataatacatcccaagaaaatatcaagtgaagtaagaattatggttttttcttagtttttcaatagtttattggtgacctttttgcagtttcaaaggtctagaggaggtagatgatggaccacagtggcacgcccagagaatggagaatgaggcagcgatacagttgttcttgcaagtttagctgagaagccaaggaaagagagagagaaccgtggcatgtgtaaaggttttgctgtctttttccttaagtcatctcaggcttccattacaaaatactgtagtctgcgcagtttaaacaaaaaaaaagttatttctcacagttatggaggctgcaaatcttagatcagtgccagcatttgccctcttcctggcttgcagatggctgcttctttctgtattcttacaagatggagtgggcaggggggagagggagggtggatccctcccttctcttcttcttattataaggaccccaatcccatcatgggaaccctgccctcattacctcatttaaacctaattaccttctaatgaccctacctccaaataacatcttattagaggttaaggcttcaacatataaatttggggatagggggacacaggcatcccattccataaccctttcacaatgttttttttctctactttgtattataaagttgtcaaccatgtaataagtagagactagtataacaaaccccacgtacccagcttcttttctctcttgcaaccccatttcctacaaactataggcagaacatttttttaaatgtagaatcttgagcatgatctcatgaggtgaaagtcaatagaaatcaaggctaaatgctcagaaaatagataataaatgtctagtcagttttcatgtacttcttttaatgttattctcacattccataggaaattagatgctttggagaagggaaatgagcatgggattttgagtcagcaaatctatctaggatgccatccacaatatcagccctatgacttttatggcgaaatttcttaacaccaccaacttgagcttccttattttggtgacattgaaagaggatactgaggtgataatacttaaataaacaatacataaagggcttcttctaagaagtaactgaaaaaagaaataaatgaaataacataaacagaaatatctggaaacctaaaaaactgtagagtcaacttactatccccaatgtaccaagagaaacaggtacaggttaagtacactacctaatatcactcagccagcagtaaatgaaagggcctgaatgttagtcaccccacctcaaattcatggctctttctgctttactatgttgtctttcttgcttataggtgatattcaacgaataacggaggataaataagactaaattccatcctctaactgtactagtacctaacgtcttcattaggccagtttttaagatttttttagaacaattttgattttagctggtaatacaatatgtttccccaattcactgttttaatacgctaattttaaaagttgaattttctattgtccaaaggcacagagcaatttatgtgtaaagaatggggctctaattcctgaatctctacatctgctgtttcaagacatatggctttcttttgaaaatacttaacatatatggtttttaaatggtttctcaggaatgtttgaaataacatgaacataaattttgcaaaaggaagtgtaataaatgtttctaatgccaatttaagaaatggttaaaaataaaacagtaatctttaatccatcattcaaaataaattcatgctagtttttaagatgattgaaaccatcatctttaaatttttgaatgcatatcttttacattatttttaaataaaatatttgtgaaataaacagcacttcttacattctgtgttgaaacacattgggcattatttaatttattcttgatgaattatggttattgctatgaacctaagttattttcatgctctgtgacagagatgctataagacttctggaagcttgcttaatcatacataagcagccaagctcctaagcttttaactttaaatctactctttgtcatttttttatctcttcccatgctatcaatcatcatcatgagatgttacatcttactgctatagtgcaccttcttgttctgtccattctctttcaatttataacttataacttctatggaccagaaattccaaaatcagtgaagctagttgaataagattgacccttagaaaagttgtagacacaaaactaaagacaagtggaatgaacattgaggacttcatttcatgatgaaatggattctgagacatagaaataaagaatagtaaactacaccgaagtgggaatggcataagtcagaggataaggaatctttcccaaataacatgctaagttacctgctccaggggaagcacacaagtaacaaaagtgcaaaatagctttctttttttcctatacttgattcctacaaataggatctgcaagagaaagattagatatagaattgcagaatccatgctcttcaaattcaacattgtattccatcaccctaagtagatgcctctttatgtggtatatacactttacggctaccacaggtcccatctaaactataacttcacagatttaaggaacagaatcataaacgaggaactttctgcattcaagaaattgttgtttctcttgaataccatgagacatagctgagattactcactccagatagtcatttatcagggtttatttcctgtatttagtatgttcattacatggtaaactcattcccattaaccaggaagctgattttctcccaggttgacctccttcaaattacttttttcttctcccctcagagtctgtgaatccaattaaagaaatttccatatgttctgatcctatagtcttactagaataagagtctttgggttcctttcctggtcttgagctagtgaatactttccacacagaaacagttttagatcacctgatggtgatggcaaaatttcttaacatcaccaacttgagcttctttattttggtgacattgaaagaggatactgaggcgataatacttaagtaaataatacataaagggcttcttctaagaagtaacatgaaggacatgagcagaacacacaaaagacacagtctctgttttcactcttactataagatgttaatttgtctttgaacttatttatttctctactcggctactcacagaaaagccactggactttaggaagaagtgtaatttaaccaacccgaggaaataagaaaccagaagacctagactagagtggccaagagctaatacatatatattataataaatctttagcaaaccacaaaagtgaactgctacatgtatccaaaaacgtgggagaggaggcaatgatcacctacatccatggcttaacctgccaaatgaacacaggtgctaccaatagccctatatcttggcaggagttgggggtgggtgctgggtagtgtgtcaggagatgagggaactgtgaaaataacttaagagtttggcctgatagggactacatgggggtcatgtccagatctaccttctgatcctgagccagaccaagcttctttcattatagtgtgactgctgtgctggtaaaatatcaatcattttgcattttggttacttgtgtgctgcccctgaagcagataacttagcatgttaatgccctctaatttctcacctataaagcttgaggtccaaattcatcctccattacaaatcttagaaacctaatcatgaaacggtccttgcattactattgagtttggggatgagaattactcactcactgtcatggaaatcactaaaaattataaaactggtttgtgttttaggagcacagcagttgcattccagaacagaagaagcttggtctggctcaggttccagccagaaagcctgagctctcagaaggtagatctggacatgaccccaatctagtcttgtgacaagaaaaatcactctaggaccaacaaggattaagaaaatgtgtctgataactgcccttacccacaataatacaaataaacaaataaacattttgagcaaaattatgaaatgaatcagaactccagaatcttcctgtcatctgaggaaataaagccaaaatagcaaaatgtagtaaaatgtttataaaatcaaataccaaaagggaaatacccctagaccatgaacacaagagtgattaccaaggaaaaggacagtagatctgacatgactggatccatcgttcacgtactatgctttcaacatcaaagatgctgaaatcagtaaatgaaaagtagttggtccagcttgcaatgccagaagctttttgctctaaacaaggcctccaaatacattaaaataacttggaagagaacaaactatggcctccgtaacctcttttctaccaagcagattcacttttcttgtgaatatgtcagacagttccagaaaaaagtgggtggtagaggatgataaaagatatctgagatatacaagtactaagcagaaaacattacaagaaaaataaatagataagacagataaactttaataaacttttataagaaagtaggaaaatgaatttgccaactagtttatgaagttgctataatcttgataaataaactaaatatgaagtaagatacaaaaagaaagctagtccaaatccaaaaaaatgtaatgtttagagatacagatataatgatgctcatggagaaattttttcaatcatgcaaagatgatttaatctcatctgtgcaattcaatttaccacagaaataaaagagaaaaaaacacaatcttctgaataaatgcaaaaatatatatacataaaataacattcaaagcctacatatgattttgagaaaaggggaaaaactcatactaaactgaaagcagatagtttccctgctttaatgaaaactatgatactgcagcaggtgtcctacttaatgaagaaactaggtttgcgattagacaaggatgctcagaactgctactatatttctagagcgaacatgagattctagttaaagcaataatataagggaaaaaagtccaggcactctggctgacacctgtaatcccagcactttgggagtctgaggcaggaggattgcttgagcccaggagtttgaggttacagtgagctatgatcgcaccactgcactccacgttgggcaacagagcaaggccctgtctcaataaaaaataaaaattaaaaatcttaaggtgtagtggttggaaaacaaggagtaaaaatatctctatatgcagttggtaaataatttttgcacaaccaaaagaatcctcaaacccttagaactattaaatgtgttcatcaagtttgtcgaatataagattaatacgcaaaacaataacaacaacaacaaaaactgttcctcaacgccaatgattatcaaaatggggatgatttttcctgctagcagacatttgacaaaatatgaaaacattctcgttatcacagttgggcggtgtgagaggtgggtgctatagccatctagtgagtagagaccagagatgctgctaaatatcttacaatgcacaggacagcctcctataatgaagaattatccaagccaaaacattaattacaaggctgttgagaaatgctgctcctcatcagaacactaaccagtgaaaaaatgttataaaaaatgagaaaaccttcacaatagcaatacaaactataaagtatgtacagataacctaacaagatatttacacgagcttaatggagaaaatgttaagctctcttcaatggccgaaatgagacagtattttatatttgtgactgtacttatttaatttaataaaattattaattattttctaaagtcaccaatatattttttaaatacaattttttaaaattatcaatatttgaagaatttgttaatctgattctgaagtttctagtagggtagcagaggaatcttacccttcattttttgggtagttggtaacttctccaaaaagtataatataaaacaagatgtagaaacaaataggagtgcagtatttacgggcatcgatttcttagcccagtgacaattgtagcaatcttcaatatatagagtttagcttatttgaagataaccaaagttttgcatcttaaagaataaaattacagatctatgctcactagaaaattagtttttaaaacaatattcatggtattttaacatcgttgtttaaagcatgcatcctatagctgcacactaaataaagacgaaatgatcagatagaacgtttgaaatgtcatttttcctttgctcttccctaacatggcattctgctaattttagtgcatgttttatatcaaaactctctaactctaatctcccagaaactgattaatctgcattaatagcctttctgggaagttgtaagtttaatcaatttttatttgataagggtctctaatgcttttagcgatgggtgacttactgagcaacaaactgtttcaaaaccatcagcattttctgaagttatgtcagatgttgataaagtgaaattcctcatacaatacaggaatgtgattctcaattctttatccaccgagtttaacaaagatagagggccctcaaaatgttatccaaatactgaagagagataacttattaaaacagtatttcttcataatctggacacttttggttccagatagtgcaggctattttctcaatgacctgatggagctatagaagtcgctgtttgacttggttttcaaatgtctatccactacaatgaagatgttaactgtggttaactgtcactttttgcactgaatgccctacctctgagctgcaccctaattcactatatctgaacagtttttttagagtttcataaccctttacatcaaccatcttatattatcctcacaacaaccttacaaggtaaaagagaataggaatgttgctttaccagtggggaaatgagctcaatgaccttatgtcctccaaagttttgatggttttgtactaactcctaccactttttatctgggagcgctcccatccaatctgtcaggacacaccaagtggcttgatgtgagcaggatgcaatttgtggctggtagacttgcaggattcttgagggtaaagccctcttattcttctctgtgtcctcagtgcccagtgtaatacctatgtagaggacaagaaatatatttcctcattcatcactagatgtatggctgaagcccctattataaaagacagaatatcaggagaaaaccatacaaatgtatttaatgtaagttttaaaagaaactaatataagttttccttattaaggaaatgaagacccagaaaaatgagtttacctgtgtatttttttctttttgatacattcttcttatgttacccaagctgcagtgcagtggcatgattgtagctcattgaaaccttgatttcctgggctcagcctcccgagtagatgggactataggcacatacccccacacccagctaattttttgtacaatgcccaggatggtcttgaactcctgagctcaagtaatctgcctgctttgacctcccaagcgtacctctatctttttttaatgctaagtttgatgaagcagatagtcacgaagatgtagagtcggacaaaggggctatgagctaatggtaataaaccgggggaacttagcaagtcctgtttgttcatatccttctctgtgtcccttctctgtgtccctgtgtcttcagatataaggatgttcctttcctccaggtatagggagggcatctctcaaatgaagatcttatgacctgcttcaggggaaggtcagaaaattctccctaggatttattacctgctttgagggagaagggcagcaaaaaatcaaagaagacttttcctacttctttggttttctcaaattccttactttaaaaggtttgaaggtagcatgtcctgaaccccatcacctatatgcatacagaaatcacacacatgcatgcacatgcacacacacagacacacgcacacacacagacacacgcgcacacacacacacacttttatttaaattaaattctgaactccagtggtctgttcctctgctgccacccactgccccagcaagcccacacagctttacacaccatatgggcctagagttttcaaattacttatttggcaatgtacgaccccaaacactctgctttctctcaaatccacatctgtatgcctttacacctagtatttctttccctctttgtcttgcagaactaagtccccctcttccttccagatgcaggccaaatgtcagctcttctctgattcccacctcaggcaagatcaaggagtaaatcactccctgccatcccaccctttactgccctcaattattgcagagcaagataagatctgtgctgtaagtggctggtcttaggagagattataacactgaagtgcttgaagaaaatgaagaaaaccattctgtttgacattatctaaataagctgtttcaatgaagatttactgccctgtattcaacagaaaattttagtgcccgagtaacatccctttgtttaagaattaaaattaaaagactaactccagaatggaaggcaaaaagagtgttccaatgctatagaaccactttttagtatcatgcaatttccacattgctatgattttaatatggcttggccaaaacctcatgtcgaaaatttggtccccaatgtggcagtgttggaagtgggataaaatggaaggtgtttgggtcatgggggcaggtctctcgtgaacagactaatgcccttcctcagggatgaaggagttctccctctcaagaaaatggattggttccaatgagagtgggttgtttaaaaacagtatggctttcttggcttctctctctcttgcttcctctctcaccatatggcctctgcacacaccagctcaccttctgctttctgccatgagtgaaagcagtatgaggccctcaccagatgcagctgtccattcttggacttttcagccaccagaatcataagccaaataatcttcttttttttttaataaattacccagccttggatattctgttaacagcaataaaaaacagactaacatagatatataatatatttgtaaagcaaacatgaaataaccatggcagggatgaccaattagcaaatttattgcttaaaattctatataaaatgcatattattatcttcagacaattgtttgagtaaactattgtcttaatttcaatattatcaatgtcattaaaagtaatagttgttttatttaccaagtacaattccacacggactagattcagtcatttttgtttaagtttttgtttttatttttatgcataaaaccatgatataactaaaatcaatttctaaaaaaattgattttatttttgtagactggattttctttattaattacaatgtacaattgggctttgtctctgatcgggttttagtacctataagttaaggtacttatagtgaaaagtcacttacagtgaaaacttacagtgaaaagtcaagatttataaatataaaataatatctcttgggatctaatttcaagtggctaaaagccttaataaattagctttgtaaatataagcattaatggaaatatgatttgttaaattgctaattcttctcttaatatttttctggttgtctaaacacagaaatctctgtatataaaagccatgtagaaataaatcaatatatatatttcttaactgtggattgaccctccctccctgaatgatttctttaaatgataaattaaaactgatcaagtgagaaaatatatgtgaaatcatttgaaagttaaaaagctataaaaatgtaagatactcttatttaactgcactcaatgaaaccatctgaagactagcattctaccatctagttttttcttttgatagttccaaactggtaattggtttacattatctctgttagaatttctactatagtatagtctaggaagaaaagcaaacaaaatctaaaatattgtatccctgagtattaaaggcaaatcctatgaatacttctaaagaggtaatcaaatcacttttaaaaaattattatagcaaggaaatgagttgtatattgtattttcagttcttgtgcatttttgtattttgccttttcacctgattacatgttagaaatcatatatgtttttctctattctctttttctagaaaccatatatatatatatatatatatatatatatatatatatatatatatatatatatatatatatatatatatatatatatatatatatatatatatagagagagagagagagagagagagagagagagagagagaaacagatatatagatatatctatctatctatctatctatatcaacttgggtcactggtgttgttattgatttttctcatgtggcatggtaatgtagcttcagcttttctaacaatatgaaagaagatcaagtttccaagaagaaggcttgaatggtccttcccatgatgtacactcaacataaacttgggtagaccaggccagaccaacaaaggtgaaggaaagtcaggatgcaagctggctcaggggaatgagttccacaataaccctcaaaaacaaagaatggtaatctggctttcttgtgacctatgaaattaaaagtacttaaatattgcctagaaataaaatgcattttcattttttgctttatttaagcatttatattcctgttatgaactaaagatttgggtcctgaagacataaatatcacaaaaatctgaaacacctaccaatgaactattttctctgctgacacagcaggaagaagactgagcttgtatttgttgtattgcaagctgctctagtttgcttttcaagctgaacaggacggtgacattttacagtatcttatacactagagtgttaaaatgcttttgcaagcaagacttcactcagatttcttggaagtgtttcaaaattacatcattctcattactaataagtatatcttttttgctttcctgatgtttagccaaaatgttttttctttttagactgtcttattcattatagttttactacttcataccatgttaaataattttctttgctctctaaatttttcaaatgttatgttctcctctcttttctttggccagattatgcatattttataccctttattttctcttataaaatcacttccacttcataaatgatttatattactctcctctgaatccttctcctccaagattgtttccaaatctgaagtgattagattcaccagtattagctgccctgtgcagttgctgctctgagctcttaacatttattaacatattcaatcctcacaacagctttataaggtacagcctagtattttaggctgatgagcgacaggtatggagaagttaagcaatttacctgtgtttattcatctagttacgtagcagaactagacctggaactcagattttctcgttccagagcctattcttaactactctaccatattgtctctctatagcaaactgattcattagattaaatctaaactgttacttcctttattcataaaatgagcatatttatgaaaaatcagaaattaaatcagagtcaagagagattgtactgaaataatttttgtgtgtgctatggcaatgtaactcagtatacattctagcctctcttacaacttaaacccaacctaaaatatgaattgaacagcctgccattctgcattgttatttcatgggatctttgagatattttgacctgagagctgctttttacaacacaagtatttccaaggatagttatatcttagctattatcagctactattgtatgtatctcttgttaccataagaataagtggaagttaggggacaacatggattggacacttacatatccacttacttatcttttgcttgtctgtatcttcctgattttctacaatcaacattaccagtctgttgttaaaaatatatatatatatttttaaacagataaatctgaattatagagtatattcaggattaaaagttacctgcaatttttttcaagttgaacactctagaaaatcacataataatttattctccaaatttttattatatacctatgattttgtcatactgtaggcaccaaaataggtgtggtagatttaaaagggagagacagaaagagagcagtcaaatgggtactctgcccaggagcacagtaatgaagataaaacaagaattgaaaacatataattctaataaaaccactacagataagccatattcccaaatagatggcagactatacttttcatgttaaactaaaccttaataaacaaatgtatttaaaattattaagtaaatttgtacttaattagtgaaaagggcaacatacagccataataaattatgtactgaaaagttaaaatgttaaaaataaaaattccttagcccagtgccttgtttatagcaggtatcataagtatttgtacagcaagcaataatgtacataatataactcgaattgtgcaaaagtttgttgctcttacataatgaatatgaatctatcatctatgaatccatcttccactggatgtctggagaaaatagcagcagaagaagaatagcaagaggatgaggaagaaaaagaagaagaaaagaagaggaagaagaaaaaggaggaggaggaggggaaggagaagaattataagaagaaaagaagagcaagaggaagaagaaggaggaggaggaggaggaagaagatgtcaggcctctgagcccaagctaagccatcatatcccctgtgacctgcaggtatacatccagatggcctgaagtaactgaagaatcacaaaacaagtgatatttaaatggcctgttcatgccttaactgatgacattccaccacaaaagaagtgaaaatggccggtccttgccttaactgatgacattaccttgtgaaattccttctcctggctcatcccggctcaaaagctccccaacgagcaccttgtgacccccacccctgcccgccagagaacaaccccctttgactgtaattttcctttacctccccaaacttataagacggccccacccttgtctccctttgctgactctctttttggactcagcccgcctgcacccaggtgaaataaacagccttgttgctcacacaaagcctgtttggtggtctcttcacacggacgccagtgaaagaagggaggagggcaaggagggaggaggaaggaggaaggacgaagaattgaagaattatcttactctcttccataagaaaacatcatctttcaggtaaacccagcctctaaattctagacattcagtaatttcccaaccatactctacatatatcaaataaagcaaagaaataacataccaagatggaggaggagcctgtcactcaccttcccccaagacttcactgttgtgtaatgatgggtggatgctccaatcagggccccacacagctggatactgttccatctgaagttgtagctagcagaacccttgtctcctctctcctgaatctaactccagtgtcctcacacctgatgtcgaatgtctggctattgatggatgtagctgatggctttatccaagcagcccttcagtggtgtctgggtggctaactggattcactctgcaacctccttttgccatcttgtttcttttacctgaatctcattcacatactcattcaaccaacagggttgaaactgaaaaccaaacacagcagaaggaacgacccaaggtcttcttagaatgacgaaaaccactcggttgctttccattactttctgaatttgcaagccctgttccagtttgctggtgtcttctaagagtttgaatatttgtgaatcagttcactttattttaacttttggcctttattgggtttgcttcaaatgtattgtctttatgtaagacacattcaatttcttaaccaaactttgttagtaaagaaaaaaacattttgtcttttctttataaagtatggaaagactggctgtactaaaatactagcttcattttctccctagtcagatttatgttgtaacatgtaaattttaaaagagaaagagagaagagaaacatactgagacagagctatctttataactgctgtagacttgccctttccctcatcccaatttcaaaaaagatgatataaagcttcatgttggcaagttaatcacagtcagggagagaatgagctcaactgtgtatgtaaaaacttagttgtttttctttgattcatccgatagcatcacactgggtcagtttcttgtttatgctgtctttattgtttctggtcttagaacaataaacagccctaagtggtttcaattacagcagcaaaactgtgcaaatgaactttggctttgtttcatattgaatagagggtttttatgattttataaatggtgatgtttaggaatcttgccaaacctgttctataaacagtgaagagtcacatttgccagctctaggcctttaaatatccttcccttgatatggataaaatgtttttaacgttgtcctatggagatgaataggaatgatgaaattatctgcagatttagcatcaatttgcaaaaacaaagtattggaatgtttttgctggtcatgtatccattagccaatacctgatttttttgtatgtcttccttaattgcaggacagtattagtcaactgtcactcacttttaacaaatttaacatacaattgtaacagcaagaatacattacattatgctatggttacaaataaactcccaccttcccaatcttgatagcttcatagcataaaaatttgtggataaaagtattcagtaagtcagggaaatatcctacctcatgttcccacaatcacctggatgggggaaaataattctacagattcctacacaaccaattaaacattccagaattggtagcacaggccctgcatccacagggggtccagaaaagtcaacctttcatttaccttagtgcagagacatggcaaggcaaggcactaattcatttacagaacttgaagtttcagtcttagagaatattttggaagtcaccattggttagtgaatgtattagtcgactagaactgacataaaatatcacagactggttggcataaacaacagaaattaatttctcacagttctggaaggtggaaatctaagactacaatgtcagcatgtttggtttctcttgagacttctcctcttggcttacaaatggctatcttcttgccatgtttttacatggcctttactcagtgcatgttcatccctggtgtctctttctcattagaatattggattggaaagcacccatatgaactcatttaacattaattatctctttgaaggccgtatctccaaatatggttacattctgaggtactgggggttgggacttcatcaaatgaattttcaggggacacagttcagcctgtcacagtgaatgaaccatcacaaatcggtcagtgtgtctttgcagttaagatttacaagttggaggggggaggagccaagatggccgaataggaacagctccggtctacagctcccagcgtgagcgacgcagaagatgggtgatttctgcatttccatctgaggtactgggttcatctcactagagagtgccagacagtgggtgcaggtcagtgggtgcagggcaccgtgcacgagccaaagcagggcaagtcattgcctcacttgggaagtgcaaggggtcagaaggttccctttccgagtcaaagaaaggggtgacggacagcacctggaaaatcgggtcactcccacccgaatactgagcttttccgatgggcttaaaaaacggcacaccacgagattataccccacacctggctcggagggtcctacgcccacggagtctcgctgactgctagcacagcagtctgagatcaaactgcaaggcggcagtgaggctgggggagggacccccgccattgcccaggcttgattaggtaaacaaagcagccaggaagctcgaactgggtggagcccaccacagctcaaggagtcctgcctgcctctgtaggctccacctctgggggcagggcaaagacaaacaaaaagacagcagtaacttccgcagactgaaatgtccctgtctgacagctttgaagagagcagtggttctcccagcacgcagctggagatctgagaatgggcagactgcctcctcaagtgggtccctgacccccgagcagcctaactgggaggcacccccagcaggggcacactgacacctcacacggcaggttattccaacagacctgcagctgagggtcctgtctgttagaaggaaaactaacaaacagaaaggacatccacaccaaaaacccatctgtatatcaccatcatcaaagaccaaaagtagataaaactacaaagatggggaaaaaacagaacagaaaaactggaaactctaaaaagcagagcgcctctcctcctccacaggaatgcagttcctcaccagcaacggaacaaagctggatggagaatgactttgacgagctgagagaagaaggcttcagacgatcaaattactccgagctatgggaggacattcaaaccaaaggcaaagaagttcaaaactttgaaaaaaatttagaagaatgtataactagaataaccaatacagagaagtgcttaaaggagctgatggagctgaaaaccaaggctccagaactacgtgaagaatgcagaagcctcaggagctgatgcaatcaactggaagaaagggtatcagcaatggaagatgaaatgaatgaaatgaagtgagaagggaagtttagagaaaaaagaataaaaagaaatgagcaaagcctccaagaaatatggaactatgtgaaaagaccaaatctacgtctgattggtgtacctgaaagtgatggggagaatggaaccaagttggaaaacacactgcaggatattatccaggagaacttccccaatctagcaaggcaggccaatgttcagattcaggaaatacagagaatgccacaaagatacccctcaagaagagcaactccaagacacataattgtcagattcaccaaagttgaaatgaaggaaaaaatgttaaggacagccagagagaaaggtcgggttaccctcaaagggaacccatcagactaacagcggatctctcggcagaaaccctacaagccagaagagagtgggggccaatattcaacattcttaaagaaaagaattttcaacccagaatttcatatccagccaaactaagcttcataagcgaaggataaataaaatactttacagacaagcaaatgctgagagactttgtcaccaccaggcctgccctaaaagagctcctgaaggaagtgctaaatatggaaaggaacaaccggtaccagccactgcaaaatcatgccaaaatgtaaagaccatcgagactaggaagaaactgcatcaactaacgagcaaaataaccagctaacatcatcatgacaggatcaaattcacacataacaatattaactttaaatgtaaatggactaaatgctccaattaaaagaaacagattggcaaattggatagtcaagacccatcagtgtgctgtattcaggaaacccatctcacgtgcagagacacacataggctcaaaataaaaggatggaggaagatctaccaagcaaatggaaaacaaaaaaggcaggggttgcaatcctagtctcggatacaacagactttaaaccaacaaagatcaaaagagacaaagaaggccattacataatggtaaagggatcaattcaacaagaagagctaactatactaaatatatatgcacccaatacaggagcacccagattcataaagcaagtcctgagtgacctacaaagagacttagactcccacacattaataatgggagactttaacaacccactgtcaacattagacagatcaacgacacagaaagtcaacaaggatgcccaggaattgaactcagctctgcaccaagcggacctaatagacatctacagaactcgccaccccaaatcaacagaatatacatttttttcagcaccacaccacacctattccaaaattgaccacatacttggaagtaaagctctcctcagcaaatgtaaaagaacagaaattataacaaactatctctcagaccacagtgcaatcaaactagaactcaggattaagaatctcactcaaaacggctcaactacatggaaactgaacaacctgctcctgaatgactactgggtacataacgaaatgaaggcagaaataaagatgttctttgaaaccaatgagaacaaagacacaacataccagcatctctgggacacattcaatgcagtctgtagagggaaatttatagcactaaatgcccacaagaaaaagcaggaaagatccaaaattgacaccctaacagacatcacaattaaaagaattagaaaagcaagagcaaacacattcaaaagctagcagaaggcaagaaataactaaaatcagagcagaactgaaggaaatagagacacaaaaaacccttcaaaaaattaatgaatccaggagctggttttttgaaaggatcaataaaattgatagaccgctagcaagactaataaagaaaaaaagagagaagaaacaaatagatgcaataaaaaatgataaaggggatatcaccaccgatcccacagaaatacaaactaccatcagagaatactacaaacacctctacgcaaataaaccagaaaatctagaagaaatggataaattcctcgacacatacactctcccaagactaaaccaggaagaagttgaatcgctgaatagaccaataacaggatctgaaattgaggcaacaatcaatagcttaccaaccaaaaagagtccaggaccagatggattcacagccgaattctaccagaggtacaaggaggaattgtaccattccttctgaaactattccaatcaatagaaaaagagggaatcctccctagcccattttatgaggccagcatcattctgataccaaagccaggcagagacacaacaaaaaaagagaattttagaccaatatccttgatgaatattgatgcaaaaatcctcaataaaatactggcaaaatgaatccagcagcacatccaaaagcttatccaccatgatcaagtgggcttcatccctgggatgcaaggctggttcaatatacgcaaatcaataaatgtaatccagcatataaacagagccaaagacaaaaaccacatgattatctcaatagatgcagaaaaagcctttgacaaaattcaacaacccttcatgctaaaaactctcaataaattaggtattgatgggacgtatctcaaaataataagagctatctatgacaaactcacagccaatatcataccgaatgggcaaaaactggaagcattccctttgaaaactggcacaagacagggatgccctctctcaccactcctattcaacatagtgttggaagttctggccagggcaattaggcaggagaaggaaataaagggtattcaattaggaaaagaggaagtcaaattgtccctgtttgcagacgacgtgattgtatatctagaaaacccgattgtctcagcccaaaatctccttaagctgataagcaacttcagcaaagtctcaggatacaaaatcaatgtacgaaaatcacaagcattcttatacaccaacaacagacaaacagagaaccaaatcatgagtgaactcccattcacaattgcttcaaagagaataaaatacctaggaatccaacttacaagggatgggaaggacctcttcaaggagaactacaaaccactgctcaatgaaataaaagaggatacaaacaaatggaagaacattccatgctcatgggtaggaagaatcaatatcatgaaaaggccatactgcccaaggtaatttatagattcaatgccatcctcatcaagctaccaatgcctttcttcacagaattggaaaaaactactttaaacttcatatggaaccaaaaaagagcccgcatcgccaagtcaatcctaagccaaaagaacaaagctggaggcatcacactacctgacttcaaactatactacaaggctacagtaaccaaaacagcatggtactggtaccaaaacagagatatagatcaatggaacagaacagagccctcaaataacaccacatatctacaactatctgatctttgacaaacctgagaaaaacaagcaatggggaaaagattccctatttaataaatggtgctgggaaaactggttagccatatggagaaagctgaaactggatcccttccttactccttatacaaaaatcaattcaagatggattaaagacttaaatgttagacctaaaaccataaaaaccctagaagaaaacctaggcattaccattcaggacataggcatgggcaaggacttcatgtctaaaacaccaaaagcaatggcaacaaaagccaaaattgacaaatgggatctaattaaataaagagcttctgcacagcaaaagaaactaccatcagagtgaacaggcaacctacaaaatgggagaaaattttcacaacctactcatcttacaaaaggctaatatccagaatctacaatgaactcaaacaaatttacaagacaaaaacaaactaccccatcaaaaagtgggcaaaggacatgaacagacacttctcaaaagaagacatttatgcagccaaaaaacacatgaaaaaatgctcatcatcactggccatcagagaaatgcaaatcaaaaccacaatgagataccatctcacaccagttagaatggcaatcattaaaaagtcaggaaacaacaggtgctggagaggatgtggagaaataggaacacgtttacactgttggtgggactgtaaactagttcacccttgtggaagtcagtgtggcgattcctcagggatctagaactagaaataccatttgacccagccatcccattactgggtatatacccaaaggactataaatcatgctgctataaagacacatgcacacatatgttttttgcggcattattcacgatagcaaagacttggaaccaacccaaatgtccaacaatgatagactggattaagaaaatgtggcacatatacaccatgggatactatgcagccataaaaaatgatgagttcatgtcctttgtagggacatggatgaagctggaaaccatcattcacagcaaactatcacaaggacaaaaaaccaaacaccgcatagtctcactcataggtgggaattgaacaatgagatcacatggacacaggaaggggaacatcacactctggggactgttgtggggtgggtggagcggggagggatagcattgggatatatacctaatgctagatgatgagttagtgggtgcagcacaccagcatggcacatgtatacatatgtaacaaacctgcatattgtgcacatgtaccctaaaacttaaaagtataattaataaaaaaaaaaaaagatttacaagttggaaataatttgcaagcaaaagtaagactgaccaatattaggaatcctatgtgcagaatttagagtttcaagtatgagaaatttttctaactactatacaaaatcttctttgattccagtttatttcaggattttaataaaaatagttaactggaaaatgtagaacattgcctatgctgttccaattagctgtttccatttttccagaatatgcttgatacggttcggatggttgtttcctgcaaaactcatgttgaaatgtgattcctggtgctggagatgggtcctggtgggagatgtttggatcctggcttagcaccgtgtccttggtgataagtgagttctccctcagttcacaagagatctagttgtttaaaatagtctgggacctcccacttctctctctcttgctcctgctcttgctgtgtgatacaccagctccccttttgccttccaccacgagtggaagcttcctgaggccctcaccaggaacagatccagcaccatgcttcctgtacagcctacagaactatgagccaaataaaccactttttaaaataaattatccagtctcagatattcctttataataacacaaatagactaacacaatgctgtttcaattatcattaaatatttttaagagaattccaagtaaaaaactaactgatatcaaaaattataaaatttagtccttatcaacatgaagaaattatgtcaatataatgatttgcctttagagtgctgttgcttatttttcatctgacctattgttaaggatcttgattcaatggaattaggaaaaactatattttcatttatgtgctacgcattttcaaaatgtggttctgcaaaatgaacctatattgcactttaacactaagcacataagtatttacaattttgtatgtatccttgttttaatcagttaacctcgtcaagctttaatttcatatgtgcataaaagaagatgataagactgacttctcacctttaagagaggataatatttgaatataggttgtaaataggcaatcacataaaatgtaatgaaagccaacgtcagaagataaagattcctaagtataaaaattgagttttatgaggggttgctggagatgctgaactatcaacagagaaaggttattaatttttgtaggattcatttcttctctattacagatgtaaaaacaaattcaaaattcaattcatatttttttcattgaatcctttattaatcaaagaactatatttcaactcatataactcttagaggtcatctaacacaagggataatgctgatcacattaaagctaatcaattttaaatatatttacacatgccaagactgtgtaacttaaaaaaaatgtcttttcttaactgcataaatatttctgctgacaaaaacaatattgccagtatgagtcccgaagaaaagttaaatgctatttttaaaatataaaatggaaaagatagtataatacaacacaaaatttaaggacagtttggtatattgaactgagattgtccaaattgtgtaaatacaggctttgtgtaatggtttacattttattaatgtcattacctttaaaagcaattatgtcactacaaagacagaatgataaatatgagagtctgggaagagtatgtgggtgggagcaggaaacaaagaggttgattagtgggtacaaacataaagttagatagatgaaacaacctacaatatgcaatagcagaatagggtgactatagttagcaacaatatagtatatgtttcaaagtagatagaggagagaacttgaaatgttaccaacacatagaaatgataaatgctcaaggtggtggatacccccaaaggctctgactcagtcattatacattttatgtacataaaaaatacatgtacccccataaacatgtaaaatattttgtatcagtaaaaagacttgggggtgactaaagattgtgagttgtggaaaataattagtttaccctgttaagctcacacatctgctagtcaattaaataaataaatgtaataatattgttagtattaacaaatatataaaacatagtgttccaattcttaacacttaagaccattgttagtttttccttcaaataataccctctaggaaaatattgggtgactgttgcttactctgcacaactcagatgacattcatttggcaaacttacttcaactccttaaaggaaacattaattctttctactctgaatcccattactctcaatgttttaacttctgaaatccagaactcagaatttcccttaacctgccatcaggtccatcctaaggaatccagtgtcatttgtcctctcaagcactatttcttccatagccaatctgtctgtccacacttctttgcctcctagtctgccctgaagcccacgtgttgtccctttaaccagtttctcaccagcatcttagaagcccctctaccacccactttatttatctcttaatatttagtagatgtcacaacctttttctccactttgacccataggctgtcaaagcagtgacaaattcacttcattttacccaaatttcttataatttaaacacctctaattcataatcactttttaatttaccttttattaaaattaaaagttagtttactcataagaatttcatttcctgtaaaaaaaaaatatagagaagtatacaaatgaggaaggaaattactccaaatttgaatatctagagagaattattattaacattttggttaatgtctttctataattctctctctttctacctatatattatatatatatatgagattcatatctattagtctttttctctaagttatgacttttttgtgcttacaaagaaccacctcaagaattagcaaaataaccattatttttatttactatatttttataattttggggttcttttaatagcaacatctgtattagttaggtttctccagagaaacaggacaagtgaaatatataagtataaataaaacgagatttattacagagaatcagttcaggcaattacagaagctaagaagtcccaccatctgacatttacaagctagaaacccaggagacccctataattccagtcggagtgtgaagaccgatgttctagcttgaaaacagtcatctgcaatttttgatacatggaataagaaaaacattggattgttttacaagtttagccaggtttttaacaattgtaaaattttagcagttttacaaagttgatccaacattgtatattaaaaaaatcatcctttcttctgctgattcataatattctccccatcatatgctaacttttccaatttactcaaatctatttctgaactatgtattttgatccacttatcagtcagccaggtcatgttgcaaattcatgatgttttagttatttcagccttgcttcatgttttaatattttatcaagtatatgttccctcattattcatctttgcaaaccaccttaaaaaataattctagctggccgggcgcggtggctcacgcctgtaatcccagcactttgggaggctgaggcgggtggatcatgaggtcaggagatcgagaccatcctggctaacaagatgaaaccccgtctctactaaaaatacaaaaaattagccgggcgcggtggcgggcgcctgtagtcccagctactcgggaggctgaggcaggagaatggcatgaacccgggaagcggagcttgcagtgagccgagattgcgccactgcagtccgcagtccggcctgggcgacagagcgagactctgtctcaaaaaaaaaaaaaaaaaaaaaaaaaaaaaaaaataataataataataataataataattctagctaattcccttttagacttgcagctgtaattgttcagctttcctcttcttttagattttctaccactcaatttccttcactctcagaaaatccattcccctcaatatatcggagacataaaagttgctcatcctgaaattttttaacccctcctttcaaaaatctctacttatgctacaaatactcttagctcttcaaacacatcagacttctttgcctgtagacccaagtccaaaacttctaaacatggcattcagtgttctctaaactttgaactggtgtctacctttccatcctatctccttttaggccttttttcacatatttcaagcaaaccagtctcttcccctcttcctaaattaaaaaaaaaaatacctgttttattttgccaccattttttagtttatattacttctctcaataaaacatccttttccttcactactcctgctgtctccacctacctttcccattccctaattcaacacaagtaaaggctatataatggtgcccactctgatgaccttccatcctgtcatctggaatatattgcttttatacattaagctccaatatcactttgtatctctctctgaacttacattttgccttgatttgcagttatttgtgtatttgtttcatttcactagtagattataaaccccatgaggtcaaacattcttctttgtatcatacacatcttctagtcatagtttataatcaaatatgctaaaattaggtaacagaccaaaataaattcctatttccatcatcactgtattttgaattttgtttaaatgacccaatgaaattaattttaattaactctattagaccaggttagtaaaagtaacctagaaataatctatatgaggaccataattatcctattagtttgtgctaaggtttgtttatttgtccccttcaaaatttaacttcctgagataaggaggaactgaccagaacagcctgggacctgttcctattctttctagaacaagatgtcctacaatactttaagcccagtaactcaaattcatgaaggataaagcccaggacaggctgcttttccagaaccctcagctacagtgcaacatgggccacacacagatgagattccacactaggtagctttcctgagccttggatgaactccatgaagcccaggcttctactgtcccttgctgccgatatgtgaggaataaagttgcttcattcactgtgttgtgtgtgtgttctttctcctcagattcatgtatgcagcagaaactgcattccaagatgcagtggactgaagcagtaaccagtgtagagtgatctgctttgcaacaggttccaaggattagaatatggacatttttgggtgaccttatcaagcctacaaaaggttaatccaaaaagtattacaatctaaaatcttgagaaaacacaaagtttaatcacaaccactagagccatatgtctagaggatcactgtgttctctaggtgatgaaaaatctctaaacaggatggaaaaacctaaatatgactaagtggtaagtttcacaaaaagacaaaacagaaaggtaggaggatggaaagtggtatttctgggaaagctgcatttaccacctcctaaatgtcttcttctcccattgattctgatctcttgttttaccagtaagtcaactaggaggagaaacactggacatgatgaataaaataggtagtgctgagaagaagagaaacagaaggcatggacaatgtgcccaagaagagaaatatctgaggacatggccaatccaaggtggaggaattctataaacaaacaataacaacaataattataataactacttagatccctttgccatttgcaaaatggccctgagcagagaattctggtgtactcacaatgtacaggagttcagcaaaatttaaagagagtacaagataagctcgttacctatatgactgaataaatgtggatgttgatagctcagacaggccacccttccagttcaaacaagaacttgtttcaaatacagaaagaaggcaatataagagatagaaattacacagcaaatcctaccatatcttttcttacttacattgctttcctatgttaaccagccactcatgttgaaaatgataatatagaaggaaagggaaagaaaggtgatatggttggctgtgtccccacccaaatctcaagtcaaattatatctcccagaactcccacgtgttgtgggagggacccaggaggaggtcattgaacaatgggggccagtctttccatcctagtttcatgacagtgaataagtctcacgagatccaatgggtttatcaggtgtttccacttttgcttcttcctcattttctcttgccgccaccatgtaagaagtgcctttcacctcctgccatgattctgaagcctcctcagccatgtggaactgtaagtccaattaaacctctttttgttcccagtctcgggtatgtctttatcagcaagtgaaaatggactaattcaatagagcaaccagggttctttttcctttcagtccttccttaattatcagtaggctgaaagtagaaagtattagaatgtgtgcatatcaaaaagtgatatgaatacagttgcattagtttagggtagtgtttgcactgtttcagaaaatatatttgcatatacattctaccaaatctgaattatgtgatattgttgattcacaattagattctctgaaatttgtattaaaactgtcattgtatgagacaaagattaacagtaaaaattatgttaatgatttaaaattttattttatttttactttgacattaaatagcaaataaaaataaataactcacagagaaacatgaagtgaagaaaaaaaacaaattttaacacatttagcaggatttttttcctgaattttgaacaagaggcctcacattttcatttttactgggcctcacgaattacataagaccgtgtacccctaccatctgactggtttgagcataagataattgatgcagaattggttttcattaagatcaaaacctgtgaggaattcagttacatttttgctgtcctttcctgagcatagcttagttctaaatgttcaatgtttcttgtaataactgcatggtgcaagtctcaaagcttcctttgtcttgccaggacttaaaacactagataatctgcctgtttccataaattaaaaaaaaaaaaaagtctcctatttctcatcttacctgtactccgtaagcttggttccttgataccaaaccacagattattttttctcacattaaaataagaaactctgtgtgtaagtgcccaaataaatctttcatgaccttaattataggtaatactatgttaaatttgcctccaacagatgagagtacaatcatcttactggaaatgttgaaattaaaatattttcttgatagaaattataaacccctgaaagctgaccatagtaagcttatagatttttagtgaagtttttaaagtggtagtggtcagttggatgatatatggatttacttctgagagcaatgctgtgttgctttatacttcaaatcagtggttaaaaccagattctcgtagaggccaggagggctctaaagttgtattaaggcccaacaagatccaagattggatcaaggatgccaatcagatagcagtccagatctttttcctataccattgctccaactgttgaaattccatgcaataagctagacctctagataagctttcattgggagaaaccattgtggggtttaaaggaaaacacagcaacaaatctctccccatcactttaccaaataacctgatctttataagacaaaaaataatgaaagataaagagaacataaagaattttctaggagttggccataagatggctgattagaagaatatgcagtccatggcactcacaaagaggaacaaaaggggtgagtgaatacagcaccttcaactgaaatatccagattcttgcattgggactgattaggcaaacaactcggcccatggagaatgaagaaaagcaaggtggggcaaaggcccaccagggagcaacacagtgccaagggaacccccacccccagcaaagggaagtgatgagtgattgtgtgacccaacttgggaaaccatgcttctcccacagatctttgcaaccttcagatcaggagatcccctcgtgagcccacaccaccaggaccttgggtctgacacatagaactgtgtagtctcagcagagcagctgctcagtcacacacagagacccaggagctttccatactctggccctgggatttccaacaaacatgtctgcaactcaggcaaaacaggaggtctgtacagacccctaggaaggggaatgaatccaaggagccaagcagtgtcattctgcaggccccacttccatggcacctcacaagataagactcactggtttggaattccagtgagccaatggcaacagggtagagcctgcctgagacaggacagagttccagtcctccaggggaggagtggctgccatgtctatagtccagtcaactcagctgttccagcctgccagttttggagagtgcaaatggcccggtcaaggaagggtccctgccaaggcagcacagctgctttaccagatcatggccagactacttcttcaaatgggaccctgatccattcctcctcactgggcaggacctccctgccagggcttcaactatcccagccagtttcctatgaacacagctctgatctctccatggggtggagcccctggaggaggagcaagccatgatcaccactctttggttgactcagccatttcaactggctttggaaagtccaaacaatccagccaagaaaggctacccccagagcagcacagccactttgccagatcacggacagatatcttctttaagcagaactttaatccattcctcctcatggttcaggtcttcccagctgggggccttgagccacccctttccatattctatggccaacagagctctaattttcttctgggacaaagtgtcccatgggtggggcagtctgccatggtggctgttcgggcatctcagtcaatccagcctgtgggccctgaagagcccatagtgaacagagtctgaaaggatcactaacacagcatacctgctctaccaaaaagcacccagactgctcctttaagtgagcacctgatcctgttcctcctgacagggtgagacctccaaacgggtctccagctacctcctactggcacatttgggctggcaactggtcaataccccgctgggtgaagcttccagaggaaggagcaggctgtcatcttttctgtttcccaagcttcactggtgatacctctagatatgggaaaaaccaaggcaattagggtccagagtggaccccaagcaagcttcagcagccctacagaagagtggcatatttaaagaaaaataagcaaacagaaaacaacagcaacaaaaaagaccccacaaaactccattaaaaggttagcatccccaaagatcaaaggtagataagcccataaagataagaaagaatcagcacaaaaacaccaaaaactcaaaaatccagagggccccttctcttccagatgactgcaacacctctgaagcaagggctcagaactgggctgaggctgagatggctgaaatgatagaagtagaattcagagggtgagtaataatgaacttggctgagctaaagcagcatgttgtaatccaatgcaaagaagataagaatcataataaaacaatacaggagttgacagtcaaaatagccagtttagagagaaacaccaacctgttagacctgagaaacacactacaggaacttcacaatgcaatcacaaatattcatagcagaatagcccaagtgaaggaaagaatttcagagcttgaagactatctttctgaaataagacaagcagacaagaatagagaaaaaaagaatgaaaaggaatgaaagaaaacctctgagaaatatggaattatataaagagactgaacctatgactgactgggatacctgaaagagacagagaatggaaccaatttgaaaaaattacttcaggatatcatccatgagaacttccccaacctggctagacaggccaacattcaaattcaggaaatgcagagaacttcagtaagatactccacaagaagatcatctccaaaacacgtaataatcagacgctccaaggtcaaaatggaagaaaaaatgttaatggctgccagaaagaaaggccaggccacttaaaaagggtcccatctcacaagagacccatctcacaagcaatgatacacataggctcaaagtaaaggaatggagaaaaatttaccaagcaaatggaaaacagaaaaaagcagaggttgcaatcctagtttttgacaaaacacactttaaaccaacaacgatcaaaaaagacaaagaagggcattacacaatggtaaaggggtcatttcaacaagaagagctaactagcctgaaaatacatgcacccaatacaggaacaaccagattcaaaaagcaggttcttagagactttcaaagaggcttagactcacacacagttaagaatgggagactttaacaccccactgacaatattaaactcattatagagacagaaaattaacaaagatattcagtgccttactcagctctgaatcaagtggacctgacagatatctgtagaactcttcacccaaaagcaacagaatgtacattgttctcatctccacatggcacttactctaaaattgatcacagaattggaagtaaaacattcttcagcaactgcaaaagaactgaagtcataacaaacaggctctcagaccacagcacaatcaaattagaacccaatattaagaaactcactcaaaaccacacaactacataaaaatcaaacaacctgctcctgaatgactcttaggtgaaaaatgaaattaaggtagaaaccaagaagttctttgaaaccagtgagaacaaagatacaatgtaccagaattcctgggacacagctaaagcatgataaatagggaaatttgtagcactaaatgcctatatcaaaaagctagaaagatcttaagttaaaaatctaacatcacaactaaaagaactagagaacctagaccaaatgaattccaaagctagcagaagacaagaaataaccaagattagagtggaactgaagaagataaagacacaaaaacccttcaaaaaatcaacaaattcaggaacagattttttgaaaaaattaataaaatagactgctagctacactaataaagaaaaaatgaaggaagaatcaaacacaatcagaaatgatcaggagtgttttaccacttaccccacagaaatacaaacaaccatcagagaataatacaaacacttctatgcacgtaaactagaaaatatatattaaaaaggatacatttctagacacatacaccctcccaagactgaaccaggaagaaattgaatccctgagtagaccaataatgagctctgaaactgaggcagtaataaatagcctaccaaccataaaaagcccaggaccagatgaattcacagctgaattctaccacaggtacaaagaagagctggtaccatttctactgaaactataccaaagaaattgaaaaggagagactcctccctaacttatttcatgagggtaccatcatactgatacaaaagcctgacagacatacagaaaaaaaaagaaagaaaaaaataaacttcacgccaatatcctcgatgaacattgatgcaaaaatcttcaataaaatactggaaaaccaaatccagcagcacatcaaaaagcttatccatcacaatcaagtaggcttcctccctgggatgcaaggttggttcaacatatgcaaatcaataaatgtgattcatcacatataaacagaagtaagacaaaaaccactaattatttcaacagatgcagaaaaggcttttgatctgattcagtattctttcatgttaaaaactctcaacagactaggtattgaaggaaaatacctcaaaatcataagagccatatatgacaaatatgacaaacccatagccaatatcataccaagtgggcaaaagatggaagcattccccttgaaaaccagcacaagacaagtatgtcctctctcaccactcctattcaacataggaaacataggaaagttctgcctagggcaatcaggcaagagaaagaaataaagagcattcaaatagaaagagaggaagtctgtttgcagatgacataatcctacatctagaaaaccccatcatttcaccccaaaagcttcttaagctgataagcaactttagcaaagtctcagggtacaaactcaaatgcaaaaatcactggcattcctatataccaacaacaagcaagcagagagacaaatcatgaatgaactccctttcacaattgccacaaaaagaaaaaaagtacctaggaatacagctaacaagggaagtgaaggaccttttcaaggagaactacaaaccactgctcaaggaaatcagagaggacacaagcagagaaaaacattccatgctgattgtattagttcgttttcacgctactgataaagacatacgtaagactgggaacaaaaataggtttaattggaattacagttccacatggctggggagtcctcagaatcatggtgggaggtgaaaggcacttcttacatggcaacggcaagagaaaaatgaggaagaagcaaaagcagaaacccctgataaacccatcagagcttgtgagacttattcactatcacgagaataatacaggaaagaccagaccccatgattccactatctcctcctgggtccctcccacaacacatgggaattctgggagatacaatctgagttgagattggggcagggggaggtgacacagccaaaccatatcatcatgtcctcacatgtcaaaaccaattatgaattcccaacagtcccccaaattcttaactcacttcagcattaacccaaaagtacacaagtccaaagtctcatctgagacaaggcaagtcccttccacttatgatcctgtaaaatcaaaagcaagctagttattttctagatacaatggaggtacaggtattgggtaaattcagtcattccaaatgggagaaattggccaaaacaaagaagttacagggcccatacaggtccaaaatccagcagggcagtcaaattttaaagctccaaaatgatctcctttgattctatgtctcaaatccagattacaccgatgcaagaagtgaattcccatagtctggggcagctccacccctgtggcttcacagggtacagactccctcctggctcctttcacaagctggcattgagtgtctgcagcttttccagatgcacggttcaagctaccagtggatctaccattctggggtctggaagatggtggccctcttctcatggctccactaggcagtgccccagtagtgactctgtgtaggggctctgatcacacacttcccttctgtgctgctctagcagaggctctccatgaggaccccacccctgcagccaacttttgcctgggcatccaggcatttccatacactttctaaaatctaggtggaggtcccaaacctcaattcttgacttctgtgtacccgcaggctgaataccacatggaaacttctgaggcttgggacttccaccctctgaagccacagcctgagctctatgttggctcctttcagccacagctagagtggctggaacacagggcaccaactccctaggcggcacacagcatggggaccctgggtctggcccacaaaaccactttttcctcctgggcatccaggcctctgatgagaagagctgccatgaaggtctctgacatggcctggagaaattttcaccatggtcttggggattaacattagtctccttgttacttatgtagatttctgcagccagcttgaatttctccccagaaaattggtttttcttttctatcacattgtcaggctacaaattttctgaacttttacactctgcacctgttataaaattgaatgcctttaacagtactcaagtcacctcttgaatgacttgctgcttaagaaatttattccaccagataccctaaatcatctctctgaagttcaaagtttcacaaatctctagggcagaggtaaaatgctgccagtctctttgctaaaacataacaagagtcatctttgctccagttcccaacaagttcctcatctccatctgacaccacctcggcctgaaccttaatgtccatatcgctatcagcattttgggcaaagccattcaagaagtctctaggaagttccaaactttcccatattttcctgtcttcttcttagccctccaaactgttccaacctctgcctgttacccagttccaaagtcacttccacattttcaggtatcttttcagcaactccccactctacttgtaccaacttactgtattagttcgttacacactgcttataaagacatgcccaaaactgagaacaaaaaggggtttaattggactaacagttccacatggctggggaggcctcagaatcatggtgggaggcaaaagtcacttcttacatggcagcggcaagagaaaattgtgggagaaacaaaagcggatacccctgataaactcatcagatcttgtgaggcttattcaccataatgagaatagcacaggaaagaccagcccccatgattcaattacctcctcctgtatgcctcctacaacacatgggaattctgggagacacaattcaagttgagatttgggcagggacacagccaaaccatatcactcatggatagaaggaatcaatatcattgaaatggccatacttcccaaagtaatttataggttcaatgctattcccattaaactaccattgacattcttcacagaattagaaaaaaaaaaactgttttaaaattcatatggaaccaaaaaagagcccaaatagcaaagacaatcctaagaaaaaagaacaaagctggagtcatcacactacctgacttcaaactatactacaaggctacagtgaccaaaatagcatggcactggtacagaaacagacacatagaccaatggaacagaatagagaactcagaaataagatcacacacctacaaccatctgatcttcaacaaacctgacaaaaacaagcaatgggaaaaggattttctattaaataaatggtgctgggagaactggctggccagatgcaaaaaaaaattttgaacccaaaccccttccttataccttattcaaaaattaactcaagatggattaaagacttaaacgtgaaacccaaaactataaaaattctacaagacaatctaggcaataccattcaggacataggcacagacaaagattttatgacaaaaatgcctaaagcaattgcaacaaaagctaaaattgacaaatgggatctaattgaactaaagagcttctccacagcaaaagaaactatcatcaaagtggacagacaacctatagaataggagaaaatttttacaatctattcatctgacaaaggtctaacatccagcatctacagcaaacttaagcaaatttacaggaaaaaaaaaaaaaaaaaaacaacaacaaccacctcattaaaaagtgggcaatggacataagtggacacttcccaaaagaagacatatatatggacaaaaaaacattgaaaaaaaaagctcaacgtcactaatcattagagaaatgcaaataaaaaccacagtgagatatcatttctcaccaatcagaatggctattattaaaaagtcaaaaaattacagatgctcatgaggttgtcagaaaaaggaatgcttatgtactgttggtaggacaggaaattagttcaaacattatggaagacaattcctcaaagatctagaagcagaaataccatttgacccagcaatcccattactgtatatatacccaaaggaatataaataatcctattataaagatacatgcatgtgtatgttcattgcagcactattcacaatagcaaagacctagaaccaatctaaacaccctccagtgatagactggataaagaacacaccatggaatactatgcagccataaaaagaaacaagatcatgtcctttgcagggacatgggtggagctggaagccattatcctcaggaaactaatgcaggaacacaaaaccaaatatgtgttctcatttataagttggagctgaataatgagaacacatggacacatgggagagagagacaaagcacactgggccctgttggagggtcggaggttggaggagggagagcatccggaagaatagctaatggatgctgggcttaatacctaggtaatgggatgatctgtgaggcaaactgccatggcacatctttatctatgtaatgaacctgcacatcctacacaggtacccctgaacttaaaagtggggaaaaaaagaaccatactttgagcagccagattttaaattttcccagagctctttcaacattacctatagtgtcttaggatgggtgaagatttttgcatgtaatagttctagtttttcttctgtttttattttgcctgctttgtaaatgtcattttaggtgcttgcttcataacagaatagcagaattgatgcaactacattaaaacagaaagggagacacagtgtccggctgccttgggcatttctgttagcagaaatggaagtctttcagaggacttaatttttaatagctatgctatcagattctcagtcttggcattagggctaggtgttggaacttcccataaagtgttctcattatggactctctgctccataccataaaatgaagataaataaataaatattttttaaaagcattttctaaataaacacactggagactttcggagaatggaaggtgggaggagggagagcatcagttaaaatgaccaataggtactaggcttaatactggggtgatgaaataatctgtagaacaaacctgtacttgtaacaaatctgcacttgtacccctgaacttaaaagttttttaaaaaaatttctaaataaatgaagtttcttttttcagcaaatattttttaataagatcaccactgatagacccattaaaatcatgcaatttatactcctctcttcctagactcttaacttaccttgaaaattaaggccactggaatgaaataaaacctattaatgccccaggaatcattgcgctttgtaagccatttgcccctccgctaacaggtcccacaatagtgtaatctgtgatattggagtttgtttctgctttctgccttctcctcctgtctattcagaatagcatcatacttatattaactttattatatatttgctatttacttagtttaccaatctaaaactacattcatttgacatttaaggggggaaaataatttgcacagtccctacaattccatccaaacgtttcacttaattagcctgtgccccaggtattagatgtagcagtcaagtctgaaaaaaaatcaaatcaagtaggctaaatggaatgaatgtgtgaattaactttaaaaataccctattgctggaggagatgaaaaacaaaatgtattgttcttttgaatatacacgccttttaagaaagtcgatggcctcttttaaaacagccttagagaactctcaaccatcagagtcacaggcatccacatttctgggatggaaatccattcagggcttctgacatagtatatgcaagaaaagctcctgctttccaactgtgatgcatcaaaggaggcttttctactcagcttgatgttataaattcaagtgaataacaataaaccagaaggtggctctatgttccttttttaattctaattgttgggaaaatagtctagattattaaaatccccagagaatgactatacatcctccccatatcacaggacgctggcagtctaagctctgatttaaaggtattccagtagcatgcttttggatgttttgattagtgttatccaaattaatattacttaagaataaaaatcaccaatccattaacaacaattttaaaagatcaaaatctgtgtgtcagaattaacctgtgcaaactctggatgcatcctatgctattatttactatccctttgagtttatgaataaaaagttgcattttcagaattatttatatcaaggatctcccaattattgaaaaaactgcatgttcttttaagaacacaaaaagtaggccaggcatggcagctcacacctgtaatcccagcactttgggaggccggggtgggtggatcacctgaggtcaggagtttgagaccagcctgtctaacatggcaaaactccgtctctactaaaaatacaaattagccaggcttggtggcaggcgcctgtgatcccagatacttgggaggctgaggcaggagaatcacttgaacctgggagacagaggttgcagtgagccgagattgtgccattgcactccagcctgggcaacaagggggaaactccatctccatctgagcctctgaattagaacagaagtacacattcttttgcagcccaaataaaaggcataataaaatttatgagggatgtagaacagcaagaaactcatgtgcatacatcagaaggaacatggccagtctttaacagcaacttcagacagcgacctgagcaaggatagtaccagtgaatggagcagattaccaattccttcccacctaccctttaattttttattgtgataagaacatttaactcaagatctatcttcctaacacagttttaagggcacaatattgctaattacaggaacagtgttatacaacagatctctagaatctatttatcttgcataactgacaccttacacccattgattagcagctccctattccttcctcctctcgtcccctggaaaccatcattttactctctgctttgatgaatttaactattttatatgcctcatgtaagtagaatcatgcaatatttgtccttctgcagctggtttattccacttagcatgatgtcaaagttcatccctgttgtcacgtattgcaggacttccttcttttttaaggtggaataatatttcattgtatgttcatgccacattttcttcatccattcatcagtgataaacatttaacttatttccacatcttggttattgtgagcagtgctgtagtgaacttcggagtgtaaatatttcctcatcatctctattccaattcttttaaatacccagaagtgaaattgctagatcatatggtagttctacttttttaatatttaaaaaagaagtctgtactatttttcatagaggctgcaccattttacatttccaacaacagtgtaaaagtgttccaattactccacatccttgtcaacacttatcttttattttgtttttattatagctattctaacatatgtgaggggatatctcattgtggtttttattaatgtctccaaagaagtgcaagcctgggcatcatgaagaagccatctctacagaatatacaaaaattagtgaggcatggtggtgtgtgcctgtagtctgagctactcatgaggctaaggtgataagatcacttgagccaaggaggctctgaggctgcagtgaaccgtgatcatgctaccacactccagcctaggtgacagagtgataccttgtctcaaaaaaaaaaaaaaaaacagtacaagtggccaacagatatatgaaaatatgctcctgctcaacattactaatcatcagggaaatgcaaatcaaacccatctggtttttgaaagcaggatttatgctcctggattgagtaaacctgaagggttcttggacaatttgggatgaagaaatctcaagaaaaaaacatttattggcaccaataatagcaggttggaggtcccaaataattaactggagagaaagaaaggaattctagctaccttatactggagcatcagttcataacagctagattatagattatgggtttttttttttttttttttttttttttttcagaattagccattgataattcagtttcataaattgcctgttcttattctttgtcagtttttagcatacattctttcctaattgttgtgaaagttccttcatatattttggctcctattctaatttttaactcctaattgttttccttccttataaaatctaatctcgtttattttttctcaccattttttgtcagttgcaaagtgtatccctagtcattcttcaattcgtggatttacacattattcacagaaagaaaccaaggccaaggagcaagctgaaattccacacattttagctcttaaatctattatttgaccctaaaagcttgttaattcctattaagtgacccagaaacttctcaacaaccagcatagttcaaagccagtctcttaattatttatctagtttcccagtcctctgaacttgtgttagttgagttcttcagggcattctttttctcatttgggcttttatttttttgctatgtcataataaaaataataaaattgaggagcatattgatttgacttgtgagctaatgggtcaggaaaggcacatcactaaaaataagagaaatttctgttagaatcatgtaaatttctcttttcctattttaaaatacaaaagttcattatttttaactagttgaatgtttcttgttaagctagtttccagtgtctaggtgggtgccaagtctatgaattatttgaattaaaacctgtggaaggatagaaaattacacaaaaagggaattgtttatatatgtatattataccctgttgctttggaggccttggcttgacattgctcttatttttctatataaatatgagaaagccaataaaataattagagcaaattttgaaaacacaggatggtgaagtgctcttctctgctcatatttacctgccattttctcaagagattcaagccttattacaatgccagatttgcacacacaaaagtaaagtacagtgaaagttgattgttatttatcttgggattcagggattggaagacagacagtggatgggagcgggcaagtttggccaatttaacccacttttcttctgatgatctggaaaataaaataaatatgatcttagaactttaatctcttgttactctacccttccagtgagatgccttgcaaatcatagacactcagtaaacatctgtgtacttattcaataaaagggggcactcacaatagaataatggtagtctgtttttgtatgcatgtcttccctttatctataatccaactcttctcacaagtgtggttaaacactcagcacagtactctcatctcagctgtgataagttttcctcaaaactgagaaaaagagacgatcaaatgtggacttcaggtttcattttgtcaccacaaaattctattaactttcccaccatctgtaccaaataacctactctatcttttataactgatgaaacctcccttatgaaatctaggaccaacctcaatacttgtgactgttcttgactacacagacttcaaacttccccttcctgcatcatcttctccctttctatgggaatattctcaaggcataccagcatgccatagtcggtcctttctgacaaatgctccctctagttacaacacaatttctctcctccccttcacatataatctatctcctcaacccattccaactggcattttccctgccatgccactatacgtgatcttgccaaagtcacctctgactactatctcataaaatctaagcactcatttttctctgttctacttgacataagtgactactcatcttcattcattttttaacaaatatgtattgattatttactacctgagaatactgagagtactggcctaagtgctggggagaaagaagtaaaaaaaaaaaaaaaaaaaaaattgaaaaataccccttccttgtagagtttgcactccaaaaataagcaatgtaaatacataaaatacgtgctatactagagagtgataagttcaaaggttcctgaatctggtctggtgaaacagaacactcacaccacaagtcaagcaaaccaactttaatattcccagataggtagcaaagacaaacagaagccaggatgcatggtaagccagtccctcaagggtcaggaaaacctgcccaggacaaatggagtctcctctgtaaatgccctttatcacaccacagctgagcaaccttgaaagcactatgctctgggttttgtaccctgggcatttcttggctcactgacccaagcattgcagaatatcctgttctgggaagaggaagacatagctcaagttgttccagacattttctctttatctcaggatattgcattctcagtacattctgcctagtaattgccaataagagggagataagctggcttggccacggtcatttgggacctgtctttcaagagcaaaagtttacaaatataaagtaggaaaagggaataagaagaattgggaagaaggtttgacattttagatagtaagatcaggaaagacctttctaaaaggtgacattttagcaatgatcagaaggaagaaattgacttatctaaggaaacataattgcaggcttatgggaggagcgaagtaagtgcaaaggcccagaggcgtaagtgtgactggtgtactaaagaaaaagcaagaataccacagtggaaagggtggagcaagacgaacagagggtggcaagagatgaggtcagagatgaaactgagggccaacccatagtaagcgcattttggcttttattctacgtgagatgagagacaaattttaaacaatggagagattctatctgtatttaacagaataactccagctgctttgttgtgactaaactgtaaaaggggtgaatgcaaaattagggagaccatgaagtactattgcaataatccagcaaagtgctgatggtggcatgaggagcatggtattgtgggagtggcaagaagcgaaagggttctagatgtatttttgagggtgcgctgacaatatttaataaaaatctggattgtggggggcgagaaaaaatgagagttaaagaatgactacaagatttccgacatgaagaacagatgattcaatgaagtagaaagcattgcaaaataggcttagcagggaattatctggatctctgatttgaatttgttaacttttagaggtctattaattatcctagtggagatagatagaagtctggagtctgggagagagggttgagctgaacctaatttggggaagataaggaggagccagcaacaaagacagagagcagccattcaggtaggaggagaataggtgaatgtggccattgaaattcaagtcagtaaagtgtttcaggagaagagagtaatcaacatgtcaaatgctacagttatgtcaaaacaaatgaggagcacgcactttacaaggatttagcaaagtgaactgatggattcctgactctggataggctagtgaaaggctgattggtgaggagtcaagagagaccactagggagaaattgggtacagaaaatgtagacaactgttcccagcagttttgctataaaaagaaaaaaaatggaatagtagtaggatgagagagtacactcaagagaaatagtagcatgttcgtacgctgataagatatttcccatctcagccaatggtaaccccatccttccagttgctctggcccaattctcaaagctatcgttgattccttttttttttttctgagactacgcagaaacaatggaaaattttgatagctgtactttcaatatccagaaataaagagaattgaaagaattagaagactccccatctctaatgagtctaagaaataatcatcaatggctgctcaaaaccaaagagactataagaatcacgtgccttccaataagtatccaacaccacctctgaagaaaatcaaacctggatacaatcaagccactagatataaccacaaaggctcataaattatacgagacagaagaacttatgtgacccaacaggcacacagttaacattattcagggtgcggcaaactccagaggacaaagtgacctagtcttcagaaaataaactataagagaaaaacagagagagaagagagagagaaagacagcaagcaaacctaaaggttaaaagacataaaggacatggcaatatgcttctccacaaaatgtgtgaatactgtctgaataatgatttaaacaaaccaatttaaaaattacaagacatttggggaaatttgcacactgaatggatgtttgattatattaaagacacaatattttaggtgtgacaattctgctgtggttacacttatttatttatttgtttgtttatgtatttatttatctatttattttgagacagggtctcactctgtcacccaggctggcgtacagtggtgtgatcatgactcactgcagcctcaacttcgtgggccaagataatcctcctgtctcagccttccgagcagctggttttgccatgttgcccgggctggtctcagattcctgggctcaagcaatcctcccgcctcggcttctcaaattcctgggattacaggtgtgacccaccacaccacgcctgtggttacatttttaaattgcttttatcttttatactaaaataattacacagtgaataatattatacctggtgatagtttcaaaacaattcaatagagggacgtagaggggacaactacaaatgcaaatggattagccatgagtggacctttgcaggtagatggttcgaattcatgctactgttctctctctccacttttgtttatgtctcatgtttcatctaacaagaagcttttttaactctattaaaatttgctgtcataataactaaaaaagagcaaagaaaacaaattgttacaaaggtggcaagagaggtgtcaggcctctgagcccaagctaagccatcgcatcccaggtgacttgcaggtatatatgcccagatggcctgaagtaactgaagaatcacaaaagaagtgaaaatgccctgccccaccttaactgatgatatgccaccacaaaagaagtgaaaatggctggtccttgccttaagtgatgacattaccttgtaaaagtccttttcctggctcatcctggctcaaaaagctcccctactgagcaccttccaacccccactcctgcccatcagagaacaaccccctgttgactgtaattttcctttacctacccaaatcctataaaatggccccacccctatctcccttcgctgactctctttttggactcagcctgcctgcacccaggtgattaaaagctttattgctcacacaaagcctgtttggtggtctcttcacatggacgcacatgaaatttggtgccgtgactcagatcgggggacctcccttgggagatcaatcccctgtcctcctgctctttgctccatgaaaaagatccacctatgaccacgggtcctcagacccaccagcccaaggaacatctcaccaattttaaatcgggtaagcggcctcttcttactctcttctccaacctctctcactatccttcaaccactttctcctttcaatcttggtgccacccttcaatctctcccttctcttaatttcaattcctttcattttctggtagagacaaaggagacacattttatctgtggacccaaaactctggcaccagtcacagactcaagaaggcagccttcccttggtgtttaatcattgcagggatgcctctctgattattcacccccatttcagaggtgtccgaccacgcagggatgcctgccttggtcctttacccttagcggcaagtaccgcttttctgggggcaagaaccccccaaccccttctctctgtgtctctaccctttctctgcttttctaggggcaagaaccccctgatcccttatttctgtgccccaggatcttatctctgcaccctgatcccttatttccatgccccgacctcttatctctgtgccccgatcccttatttccatggtccaacctcttatctctgcacccctaccccttatttctgcaccctgacctcttatctctgtaccccaaccccttatttccatgccccaacccctttcccgcttttctggagggtaagaactcccaaaccccttccctccatgtctctagtctctcttttctctgggcttgcctccttcactatgggcaaccttccaccctccattcctccttcttctcccttagcctgtgttctcaagaacttaaaacctcttcaactcacacctgacctaaaacctaaatgccttatcttcttctgcaatgctgcttgaccccaatataaactcaacagtggttccaaatagccagaaaatggcactttccatttatccatcctacaagatctaaataacaattgtcataaaatgggcaaacggtctgaggtgcctgatgtccaggcattcttttatactttgttgcctccctagtctctgttcccaatgtgactcatcccagatcctccttctttccctcccacctgtcccctcagtcccaaccccaagcgttgctgagtctttctaatcttccttttctacagacccatctgacctctcccctcatcgccaggccgagccaggtcccaattcttccttagcctctgctccccaaccctacaatccttttatcacctcgcctcctcacacctggtccagcttacagtttcattcagcgactagccttcccccaccagcccagcaatttcctcttaaaaaggtggctggagctaaaggcatagtcaaggttaatgctcctttttctttatctgacctctcccaaaatcagttcgcgtttaggatctttttcatcaaatataaaaacccagcccagttcataattcgtttggccgcaaccctgagacgctttacagccccagaccctgaaaggtcagaaggctgtcttattctcaatatgcattttattttattacccagtctgctcctgacatgaaataaagctccaaaaattaaattctggccctcagaccccacaacaggacttaattaacctcacgttcaaggtgtacaataatagagtagaggcagccaagtagcaatgtatttctgagttgcaattccttgcctccactgtgagacaaaccccagccacaactccagcacacaagaactccaaacacctgaaccgcagctgccaggggttcctccagaacctcctcccccaggagcttgctacaagggctggaaatctggccactgggccaaggaatgcccacagcctgggattcctcctaagccatgtcccatctgtgtgggatgccactgaaaataggactgttcaactcacctggcagccacttccagagcccctggaactctggcccaaggctccctgactgactccttccctgatcttctcagcttagcagctgaagactgacactgcctgattgcctcagaagcctacaggaccatcacagatgccctagataactctcacagtggagggtaagtccatccccttcttagtcaatacggaggctacccactccacattaccttcttttcaagggcctgtttcccttgcctccataactgttgtgggtattgacagccaggcttctaaacctcttaaaactccccaactctggtgccaacttagaaaacattcgtttatgcactcttttttagttatccccacctgcccagttcccttattaggccaagacattttaactaagttatctgcttccctgactattcctggactacagctgcatctcattgccacccttcttcccaaaccaaagcctcctttccgtcttcctctcatttccccccaccttaacccacaagtatgggacatgtctactccttccctggcaactgatcacatgccccttaccatcccattaaaacctaatcacccttaccccactcaatgccaatatcccatcccacagcaagctttaaaaggattaaagcctgttatcactcgcctgctacagcatgggcttctaaaacctataaactccccttacaattcccccatttcacctgtcctaaaaccagacgtggcttacaggttagttcaagatctgcgccttatcaacaaaattgttttgcctatccaccccgtggtgccaaacccatatactctcctattctcaatacatccctccacaatccattattctgttctagatctcaaacatgctttctttactattcctttgcacccttcatcccagcctctcttcactttctcttggaccgaccctgacacccatcaggctcagcaaatgacctgggctgtactgatgcaagtcttcacagatggcccctattatttcagtcaagcccaaatttcttcctcatctgttacctctcttgacatcataaaaacacatgtgctctccctgctgaccatgtccggctaatctcccaaaccccaatcccttctaaaacacaacaactcctttccttcctaggcatggttagtgtggtcagaattcttacacaagagccgggaccacaccctgtagcctttctgcccaaacaacttgaccttactcttttagcctagccctcatgtctgcgtgcagtggctgccactgctttaatacttttagaggccctaaaaatcacaaactatgctcaactcactctctacagttctcataacttccaaaatctattctcttcctcacacctgatgcatatactttctgctccccggctccttcagccgtactcactctttgttgagtctcccacaattaccattgttcctggctcagacttcaatctggcctcccacattattccggataccacacctgaccctcatgactgtatgtctctgatccacctgatgttcaccccatttccccacatttccttcttccctgtttctcaccctgatcacacttggtttattgatggcagttccaccaggcctaatcgccactcaccagcaaaggcaggctatgcaatagtatcttccacatctgttattgaggctaccactctgcccccctccactacctcttagcaagccaaactagttgccttaactcaggcccttactcactgttgcaaaaggacaatgcgtcaatatttatactgactctaaatatgcctttcatatcctgcaccaccatgctattatataggctgaaagaggtttcctcactagcaagggtcctccatcattaatgcctctttaataaaaactctgctcaaggccgctttacttccaaaggaagctgaagtcattcactgcaaaggccatcaaaaggggttagatcccattgctctaggcaatgcttatgctgataaggtggctagacaagcagctagctttccaccttctgtccctcatggccagtttttctccttcacatcagtcactcccacctactctcccgctgaaacttccacctatcaatctcttcccacacaaggcaaatggttcttagaccaaggaaaatatctccttccagccccacaggcccattctattctgtcgtcatttcataacctcttccatgtaggttacaagccgctaacccttcttgtagaacctctcatttcctttccatcctggaaatctatcctcaaggaaatcacttctcagtgttccatttgctattctactacccctcagggattgttcaggccccctctctttcctacacatcaagcttgaggatttgcccctgcccaagactggcaaattgactttactcacatgccccaagtcagaaaactaaaatatctcttagcctaggtagacactttcactggataggtagaggcctttcctacagggtctgagaaggccactgcggtcatttcttcccttctgtcagacataattcctcggtttggccttcccacctctatacagtccgatagcagaccagcctttattagtcaaatcagccaagcattttttcaggctcttagtattcagtgaaacctttatatcccttacagtcctcagtcttcaggaaaagtagaacagactaatagtcttttaaaaacacctcaccaagctcagccaccaacttaaaaaggactagacaatacttttaccacttgcccttctcagaattcaggcctgtcctcagaatgctacaaggtacagaccatttgagctcccgtagagacgctcctttatattaggccccggtctcattccagacaccggaccaacttggactgtgccccaaaaaacttgtcatccctactatcttctgtctactcatactcctattcaccattctcaactactcatacatgccctgctcttgtttacactgctgatttacactgtttctccaagccatcacagctgatatctcctggtgctatccccaaaccgccactcttaactcttaaagtaaataaataatctttgctggcaggactatgctgaatccccttaggcactctctaattagatgtcctaggtcctcccaattcttagacctttaatacctgtttttctccttctcttattccgtttagtttttcaattcatacaaaaccacatccagaccatcaccaataattctaaatgacaaatgtttcttctaacaatcccacaatgtcaccccttaccacaaaatcttccttcagcttcatctctcgcactctaggttcccacgccgcccctaatcccgcttgaagcaaccctgagagacatcacccattctctctctccataccacccccaaaaattttcaccaccccaacacttcaacactattttgttttatttttcttattaatataagaaggcaggaatgtcaggcctctgagcccaagctaagccatcgcagcccctgtgacttgcaggtatatatgcccagatggcctgaagtaactgaagaatcacaaaagaagtgaaaatgccctgccccgccttaactgatgacattccaccacaaaagaagtgaaaatggccagtccttgccttaagtgatgacattaccttgtaaaaatccttttcctggctcatcctggctcaaaaagctcccctactaagcaccttgcaacccccactcctgcccaccagagaacaatccccctttgactgtaattttcctttacctacccaaatcctataaagtggccccacccctgtctcccttcgctaactctctttttggactcagctttgctgatctcaactaataaaagtgtttttgttgacatttttctaacagaaaaacaatgcattctgagaaacagaataataacgtggaacaactgcttcttcctgccaaaactttatttgaagtttgttaaaaaaaaaaaagttaagacaaacaattataatgacttttcattagcaaaaagctctactttaaaaataaaactctaggacaacttttttcagattcagcatacaggtgaaattcaatttataactctctgaaaacctgttggagcactttcctgtttcttttctcattttatatcacattctgtgctatttttaaagaaactcaatgtgccaagtggaaaatgtttttacatgctatgaaagataaaaagtgctttttcccccaaggatgttttacacattaacctgttttcctttgctttctatttttcacatgccccttgctcatatgttttgactggttttgctccaatgaaggcaaagccacgcccatcaggaacttcaaagtcattgaaactcaccaaagaccaactcctatgatcagcccgtggacaataccggttattttcaaaccagtccttagtcaccaggattcttgacaagctcctgcaaagcagacacaggtttgtcttggtggaagctgctgactgtcatcccctcagtttgaaactcgaggtcctgctttggtgtggaagcagagcttttcttggcaggtgaaagattgcttagcaaaggaaacggtgtcaaatggaatatgtcagaacctatctcagaacaaggtcaccctgaccctaaatgaattccacaaaaactcattggagacactgttttgcaaatctggacttcaaccaaaaagaaagaaaagtggaccacagtaaccaaagctttcctcatccttcaggttgaggtctggaaaacagaatcaaagcctcccttcaattcctcctcaccacctgccttacccagatgtacattttaaatttaatcataaatcacataaaacagagtaacacagatgaattcaaatgaggtggattgcatgcatggaaggccagtgcagtatagtttaccaatgattacaagtatactttctgcttaatgtacatcacaaccatgttaagtgagttactactaaccacatttcatgggtgatgaaatgagatatgccattttgggggcctgcctgtgataggccacacagaaaataaagaggaaaatgcatccttgggctaggctctttccgatctttctctcaacattctttcgatggcagcagctcagagacaatgaggacctatcaatctgcctttctccaattctcctaccccagtcacctaatgttacctaaacccaaaaaggaaatatatacaacttcaaactcttctctaaacactaattctcctggtcgaagcttcagcaaggatgccttccacctctcaagggcaccccaccgactgattcctctgtgtcctgaagatccctattgtggctagtggataataacgctcaggaatgtacttctaccccatgaaccagaacactgtaaaactgttgttcacatttatccaataaaatccagacaatacatctggttctttttatatttttaatagtggaaatgtgtttgtgatttaaaaacttagtttctgtcaaaagaagtataatacatagtattcaacagtttcaggatctcttgtcaaaagagataattgcagaactttaacagactaacatggtactatatagaaaaatgacctctaaaatataacacatggttttagcttctagggatgatatctgaaagttaatccgacatttataaccaactgaccaggatgttcaaaaactcatggccctaaggcgtctaggagacaattaagaagaatggacattactcacaatgggaacaattcccagctttgcagaggaacacagatttggggggctttgcagccgtccctcataatgggaacaattcatattttcttcccttagagaattaagactgatgttttccataatgaatagtttataaagataatacaaaggaactttgtgggtcggccgcggtggctcacggcctgtaaggaggctgaggcaggagaatcacttgaacccgggaagtgaaggttgcagtgagccaagatggtgccattgcactccatcaagagcgaaactccatttcaaaaaaaaaaaaaaaaacgagggaactttgcgaaagtgtggttagaaaactagagttggatagttaggcttattttaagaagtttaaatattatttagaagagaaaaagaaactacttcttatccctgactcatccactctttctcattttcatgtttttgcctgacgttgttgctcatcaattttgacttaagaaaattctagcaacatttatagattttgccaaaattcagcttcttcccaaatcaatctataagaaggctcttccttaaacataatttttatatctatgaactgcactagcatttactatatatttttatcactctcaccattactggataataaataaaagctcattaaaagagttaacaaaacatatttattttaggcatcctgaaaaaaagattcaattttattatcatttctacaataagtattgaagaaaggagaatttaaattacttcatatacctgataaaggaaaacatatgcaaggcaaataaacatcttagatcatgacatataaaataatagattattactaaagattaaaatactttcttaagaattaaagcaattctaaaagcaatagtaaataacattctttctagtgatcagacactggatactatgtttgagatagacagtgaattgggaatgttgttttacagaagctcctaccttgcaaggacaggcaagtttaaatgtcagctagaaaactatcttgagttttcagtaatgtaagattttcctattcaatttcacactttaaattttatatatatatataaaagtcatgattctattgaaaaaatttctaaattggtacatttaactttatattctattattataaaatacaaacagattattaagcacagctgcacaaagtcgtcatttcaaaagagttttaagaactggataagcaaataagtgtaaccttagtcatgttaggaataagagaattcagtggaacaatagtgtgtgagtttcctttcaattttttcatcctcacaatggagaatcagctggggagccagatttacgaataatatttattccacttgtgttacatagagtgttcttatgttaagaaagttgtcaggattttaattaacattgcgaaaatttatttacataaatatgcaaagaaatcacactaatattgaagagccacaaaacaataaaaaattattaaagaaagacaatctcagagcactagcgacctgtccttagtgtgttccatacaaatttgttgtattgcctgtaagccatttatctcttccttatcaattctttcctttctttccacaaaattatccctagctagttcacaggattgttataaacatcaaatgaaatgatgaatattcatgtacttcataagttataaaatgcttatccaatatgaaacagtgtttttattgtgtgtgttgaataagaaaggaaagtttgaggtttccagctaattgtctttcaaatttgaaacacgtgtcatagtaattatccttttgtatctctttttttagaattcttgagtgatgggtgctacagatctgaaaatcattatgctggaatatttccactcctcccaaccacaaatatgtgtctatcaagagaggctgtatgttgctgtgaatcccaaatggtattaattgaattagaggttctaaaatatcattgtgaacatttaaaaagttctgccatttctaattggttcatggttgtgtaacaaaaattgtgaatgtattttgaagcaactcagaatgataaaatgagattttactcaaacccttcatataatttcaccttgattctagaatcattgggtgagttacatcaagtatttcaataagcaataaaaaagttagaatggggggaaaggaccagatggccaactagatgcagctaggaaatacctctcccattgaaagaaagcagaatatgaagtaaaccatcatattttgaacagatcttttgagagaaaatactgaacatcaataaaggggggatgcagaaactgaggttgaagacagagaaagctgggaagcctacactgagtcaccgagtgtcagactggctcctggtcctgaacaagtcctaaggaagggttaagtgaaggaagtccagggcaccacactcccatcatggacctctgggatcctagctacaaaagatcccatgactccatagacatttgaattggcaggggaaactgcctggaaagtaagaagaagaagagctcaaaactgtgtggagctcagaaggtgttatagcgcatggtacagctgcagcaaaacatcacccaggcattcatcccccaaggctccccatctggatccaagtgactataacaactgctgactgtcaggccaggagagagcaggattgtctttcctctgggaccggaaagcatctgatccctgtgctgccccttgtctgccagccccttccaaggccacgggtccggccactcccacaagagagtgaacacagaacagcctccacttcccatctgagtgttttgctggcaacctgggattagttcagcaccccaagtacaactggtgcttgaccctgaggggccagaggaaaaagctgtggcccaattcccaaacccctaggtttgagtataccacccacaggtattgagctgagatctgtggctagagcttgagcaggggaggagcctctactctcagaacacagaaaacagtgaggcacaggtttatgttcaggcatgggagctgagcatccctccctcagcaagactggtgcaggaagtgtgtagcctgttgggcagccacagcttttgcccaaggcagccccatggcatggaacacctggaatagcccagtgatctgggtgaagaaggcttcagacaaatctagctgttcaggcctactcctggggcagacagcagagggaaactgggtcaggggaacacaagctggggaggccccaaggccacctgctggttaaaaatcccaggccatgcgcaccacaccagctgcacacctgtggcatcacagtcttgccagcggatccttcacctttgaccaactgcatcaccagatcacccacagacatatcctacaaccttctctgactgcccagcttagaccagtgggtctctggggagctacagatctcttagtgacctaatcttcagttcaggccacccctaagggaggagggagtgcaacctgccagggtccccccttgaggctgaggaaacacaggcatggtgccactgattgcagagggctcccctaaggcccaagaatgaccttggtgaaacggtcatttcttgcccctctatctctccttccccagaagactgctctatatgcactgaaatacaaaacaggtgtatggcagagcctatctgctagaccttactcttaagcaccatctattgtatcataacctgaattacaccaccaaataaaaacaaattccttcactttgcaatgcctatgaaacccagtgcaggaaactaaccacaattaaggaactcatgcagagccttggcactctgaaagcacaaagaacatccagaaatgaagccaactaatggtacacgacatataccacagtcaaactctcaagggaaaaaagaatataaaaacaaaaaaacccatccaaacaatagcaatttaaaagtaacaggaagcaccagcccctcagatgagaagaaatcagtgcaagaattctagcaattcagaaggtcagagtgtttccttaccgctaaaggattgcactaggtccctagcaatggatcctaagcagattgagaggtctgaaatgacagaaatataatttagaacctggatggcaaggaagctcagtgagattccagagaaagttgaaattcagtttaaggaaaccaatgaaataatccaggagttaaaaggtaacacagcctttttatgaaagaaccaaactgaacttctggaattgaaaaattcactacaagaatttaaaaatataactggagaccttaacaccaggctagaccaaagaaacaatttgagagctcaaaaactggttattcaaatcaacctagacaaaaatcaagaaaagtgaatttaaaaataaaatcttcaagaaatatgagattatgtaaacagagaaaaacctacgagtcagtggcattcctgagagagaaggagggagagtaagcaacttggaaaacatattttaggatataattcataaaaattcccctaatctcaccagaggggtcaacatgcaaagtcaagaaattcagggaacccttgaaagatacttacaagatgactatccccaagacacatagtcatcagactctctagggtgaacatgaaagaaaaaaatcttgaaggtaactagagaaaagtcaggtcacttacaaagaaaaccctatcaggctaacatcagacttctcagctgaaattttacaagcctgaagagattgggggcctattttaagcactttttaaatgaaattctaatcaattttatattcttccaaactaagcttcataagcaaaggagaaataaaatcttccagacaagcagtcactaagggaatctattactgctagaccggccttacaagagattctaagggagttctaaacatgaaaacaaaagaacacctgctaccacaaaattacatttaagtaatatagcccaccaattatataaagaaactacacaattgagattacaaagcaaccagctaacaacatcatgacaggatgaaaacctcacatatcaatattaaccttgaatgcaaatgatctcaacaccccacttaaaaggcacagagtggcaagttagatttttaaaaaaccaagacctgagctgggcatggtggcttatgcctgtaaacccatcactttgggaagcagaggtgggcagatcacgaggtcaggagttcgggactagcctggccaacatggtaaaaccccatctctactaaaaatacaaaaattagctgggcatggtggtgggcacctgtaatcccagctacttgggaggctgaggcaagggaatcatttgaacccaggaggtggaggttgcagtgagcagagatcgcgtcattgcactccagcctgggtgacagggtgagactctgtcaaaataaaaaagaaaagaaaaaaagaaaagaaaagaccaagacccaacaatctgcagtcttcaagatatccttctcacatacaaggatacccataggcaaaaaaacatcaagaaatggagaaagatctatcatgcaaacagaaaacaaaaacaacaagggccaagcatcactattcttatatcagataaaacagaatttaaacaaaaaaagaaagaaaaaaaaaaagaacaaagataggcattacatcacataaagggttcaattcaacaagtcttaattatcctaagtatataaatacccaacattggagcacccagattcataaacaagtacttaaagacctacaaaaaaattagacaaccccacaataatagctggggggcttctacaccccattagcagcgttagatcatcaaggcagaaaactcacaaagaaattctggacttaaattcaacacttggccaattggacctaatagacatctgcagaacactacacccaacaaccacagaatatacattcttcccattgacacacagaacacactctaaaatagaatacatgcttggccataaaacaagtctcagtaaattcaaaaaaatcaaaattatatcaagcacattcttggaacacagtggaataaaaatagaaatcaataccaggaagacacctcaaaatcacacaatcacatggaaattaaacagcttgctcataaatgacttttggataaacaacaaatttaaggcagaaatcaaaaaaattattggaaattaatgaaaacagaaatgcaacatatcaaaatctccgggatgtaacaaaagcagtgttaagaggaaagtttatagcaataaatatctagatcaagaagttagaaagatctcaaattaacaatctaaatcacatctagaggaactaggaaaacgagaacaaactaactccaaagctagcataagaaaagaaataattaaaatcagagcagaactgaacaaaattgagacccaaaaatccatacaaagcatcaatgaaaacaaaacttgattccttgaaaggataaagaagattgattgatagaccactagatagatttaaaaagaaaaaaagagagaagatcaaaataagtataatcagaaatgacaaagattacatcacaaccgatcccgcagaattacaaaagtgccttagaaactactatgaatacttctatgcacacaaattagaaaatctacaggaaatggataaacttctggacacacacaatcttccaagattgaatcaggaagaagttgaaatcctaaacagaactataatgagttccaaaattgaatcagtaataaaaagaaaaacctaccaaccaaaaagaagtcctataccagatggattcacaggcaaattctacaagacgcacaaagaagagcttataccaatcttactgtaattcaaaaaattgaggagagactcctccataactcattccattaatccagcatcatcctgacaccaaaatctggcaagaaaaatacaatgataaaggaaaactacaggccaatatttctgaggaacacaaatgcaaaaatccactacaaaatactagcaacccaaatccagctgcgcatcaaaaagttaattcaccatgatcaggtaggcttctttcttgggatgcaagtttggttcaatgcatacaaattgataaatgcaattaaccacataaagagaattaaaaacaaaaaccatatgatcatcttaacagatgcagaaaatgcttttgataaaattcaacatccctttatgattaaaaaaaatccctcaactaggcattgaaaaaacacctcaaaataataagggtcacctataacaaagccatagccaaaattatactgattggaaccatttatcttgagaactggaacaagacaagtttgcctactgttaccactcctcttcaatacagtactggaaggcctaccccaagcaatcaagtaagagaaataaaaggcattcaaatagcaatagaagaagtcaaattatttctcttcactgattatataattctatacttggaaagccctaaaggctcgaccaaaaggctcctagaactaaaaaatgacctcagtaaagtttcaagatataaaaccaacgtacaaaaatcagcagtatctctctacagtaataatgttcaagctgaaagacaagtcatgaatgcaatcccacttatagtagccacacaaaaatataaaatacctaggaaatacaaataaaaaccacgatgagataccatctcacacctatcataatcccagtactttgggaggccgaggcaggcggatcacaaggtcaggagatcgagaccatcctggctaacacagtgaaaccctgtctctactaaaaatacaaaaaagttagccgggtgtggtggcgggcacctgtagtcccagccactcgggaggctgaggcaggagaaaggcgtgaacccaggaggcagagcttgtagtgagccgagatcgcgccactgcactccagcctgggcgacacagtgagactccatctcaaaaaaaaaaaaataaaaaataaaaaataaacaggttctggtgaggctttgggggaaaaggaatgcttataccctgctggtggaactgtacattagttcagccattgtggaaagccattcagagatttctcaaagaactaaatacagaaccacaattcaacccagcagtcacattactaggtatatacccaaaggaaaataaaccatcgtaccaaaaagacacatgccttcatatatttaacacaacactattcacaatggcaagaatatggaatcaacctaggtgcccatcatcagtggattggataaagaaaatgtggtacatatccaccatggaatactatgtagctattaaaaagtgaaattatgtccctggcagcaatgtggatgcaagtagtcaccgttatcctaaggaattaacgcaggaacagaaaaccaaataccatatgttctcacttagaagtgggagctaaatattgattactcatggaagtaaagctgataacaataaacactggggactactaaagggaggaggaggaaggggagcaaaggttgtaaaactacctatggggtactatgctcactacctgggtgacaggatcaatcataccccaagcctcagcatcacacaatatacccaggtaacaaacctgcacttgtaccctctgaatctaaataaaattttaaataaaactaacaagcaaacaaacaaaacaaagaagtgagaagagggtaattatatgggaattttccttatgaccttaggcatagtattcatcagagtaaaaattaacaattaaagtgtcagtagtaaaagcacaccagcttataaatagagttatttttctgccagtgggcaccaaactggggtacatgcaccccagaatacatgcaagaggggtcatggggatatgtgaagaatgtattagaacttctaataatttttatccaaaatttggtgattaagctttattaatatttagactaacaaggtacatattactgatgtatagataattatctttatattgtggggtgcatggttgctcaaatatacttattgatagaaatacaaattaaattatgggcaggtgtagtggctcatgcctacaatcccagcactttgggattgtagtctgagaccagcctggggaatgtagtaagatgaagaaagaagaaagaaaagaaaagagaaagttagccaggtatagttgtgtgcagaaggaaggaaggaaggaaggaagcaagaaagcaagccaggtatagttgtgtgtacttgtgttcctggctactcgggaggctgaggcaggaggatcacctgagtccaggaggtcgaagctacagtgtgcaatgatcatgccactgtactccagcctgggtgatggagtcagaccctgtctcaaaaagagagagagaaagagagaaatttaaaattttgaaaagcaccaacctaaacaataagggaaattttacattaagttacattgtctctagactacactgtagcaaattattagaataacaggagtccacaggagcaaagtctttgaagaaaaacaaaattaagcaacaattttaaacaaaggaaacatgttttaaacataaagttcagtgtttctgaaaatggataatgctaactcacaacacacatagctgacatagctgcacaaggaaaatgtgagagaggaagcaaggaaggaaaggagggagggagggagggagggaatgtgaagagaaagtaaatacagtgtaaaagtaaagactagtgccagctgagtgcggtggctcaggtctgtaatctcagcactttgggaggccgaggtgggtggatcacaaggtcaggagttcaagagcagcctggccaacatggtgaaatcccgtctctactaaaaatacaaaaacaattagcatggcattggggcatatgcctgtagtctcagctacttgggaggctgaggcaaaaggatcacttgaacctgggaagcagaggttgcagtgagctgagatcgcgtcactgcaccccagcctgggcaacagagagaaactcttatcaaaaaaaaaaaaaaaaaaaaaaggctagtgctttactactaactgataacaactaaagattttagtgtctaatatattgttttaaaacctccttgtctttaataaaccataattttttttgtttcctccgctaaagacactgaaaaattcaggtgcaaatgaaaatgaaagcaaaactgctctactcatatttgtttccttcattctcgatattgttcctctgcctccaggtctgtgcagtctctcatctgaaggagtagacaacaaagccactgtgcattcttcctcctgagaactgtagattgcacaacctgataccaatcatagctcaagaccgttacactagaaatcagaaaacttagactcgagaattatttctttcagagtatacaatcttaacaacacattaactttggaaggggttgggttgaaatttcccttccgtgaaatcctatgttgcccctgtttatttccaaaatcctagctgtaattgtctatgatcccatattatttcatcatatcaatttgaaatgtactatagggggaaaaatatacaacctgtaaatttctctgatctatcacataatttcgtctgtgaattgcagtgttccaaatgtgatcataagattcattcatacatttatttaggaagcatttattaattcccctatgatctgtcagataatgtgccaaatgcttcacctatgacagtaaacagagatttctcttttgtgtattcacagagtttaggggctgctggaaaagacagattagcaagcatttacacaagcaaggtgctaagaactatgatgggggcatgtgaggcatataagaacatagataaatatttaattctgacttaaagggttaaaatttcctggaggaagtgacatataagtcacctaaaatataaataagaattgaccaggtgaaggggtgacaaagtccaggtgaaggggtgacaaagtccagatgaagaaaagtcattagcaccatacatatcaaaaagagacattttatgaaatctaaagtctgggctgctatactgtacatctctgaggacagtaccagagcccatgaggtcctcccttgaattgtgcaggccacagtatttgtggcatagggtcatcccttcaaaacttgctttattatggttgaggtcagaagtatgaatgaagacatgaagaggtaagaagaggtcaaatataacagggcatcgttatccaagtgtggaagctgggttaaagtatttgaaacagagaaaacaaaaacaatcgtatcaccaatgtgtaaggactctcagtgggtcaagagaggcctgacctacttcagtttcttcagatatggtatttttcatttctagaatttccatttggttctttttcagagtttgcatttttctaatgtaatcctccatcttattttacttattatacttattttcctctgaattcttcaacgtgtttgtaattattattttaaatttcttgtttgctaaatccaacatctgggtcacctgtaagtctctttttattgaggttttcctcttgattgtgagtctcatattcctgcttttgtgcctgtctcatgtttagtcaaatgatcttagacactggagtaagtaatattttcctctataaagggcttgttttttatcctgtcagaaatccaggatgagggaagagctctttgatctaaccaagactaaagctgggttaggaatgagtagttgctttagatagttttgcctggtttcaaatgtcttgagtatgagatcaagaccctttctccagcaggacgttgagatctaagcattgcaagactgagatttctctttgcttttcagtctagtccttgggctcccatgccaccatttattcagcagaagtcctatggagaagaattggtgggcgggaagaattcactacacatctgaaactcctgcatgtttctagccaccatcccagcccatgtgcagccaataaaaatctggctggattttccttctcacagaagtgtttctgcccatgtcaagtgtgttattctgactgcccaggcgcccagacgcaataagtatgttcagaggtgaatgtagctcccactctctgctcatatcagaaagggtaatcccctcgctgcactttactgcatgtagacacttttgcatccataatttttgatagttttaaggaaaacatgacttgtatatttagccaacattgtctcattgccagagcaagtgaaatggtctttccttatccgccacaaattaagtgaaagtggaactctctattattttctgtttggagaggtttcctatactgcatactttacttagtagagctccaagcaatgccagattattaaagtgctgattatctaatgaacatttaatattaagttttatatttgtaaaaattcataaatccagtactgtgggcagtgtagtcaatatttttctcattagagaccatcaagtcatgcaaagtaagtactttccaagtttaaatgacaatggtcaatctatttactcctttgacattatgaagaagatcatgatcgtcactaacacctatgtaatagatacccatagggccccatctcacactcttacaacccatctttttactgcagacattgctataaaatcaggtccatgcatttgtaaactgacagcagctgcttcagctgcctcctgtatctctcattttcatccctgaggcttttttgccaccacctcatgggactcctttaagaacctgctaagccattctgactcacgcacaaatcaaaggagtgaggaagctaacactacaaggacaatccttgaccaatggaaaaagaaggagagtagtgaataaacactaccctcagtcatctctaagctggacagttctgagtttcatttgacacaggaccccaagggtatctggtaggactgagctccagttgtccacagtagtgattagatgaataaagcaccctgggattggttttctcccttcccctgcttcactttccagtccctagtactgtttcttgggatcatttcccaaaataaactacctgtatgcaagctgtcatatggtgctgtgctttagggaacatcatggataaaacagcttggaaagattgaacaacaattacaggaaagacagataaaagaaactagagatgggggcacattatgatttcagagatatgaaaatatcagaactatcaccatggtgtcatgcaagtgtgtctttattttaaaaatctctaacaacctcttttgtgcaaccatttcctagaatgcccactcatgttaacagtatatgagtatttttaaaataaaaaattgccaaaatttttcataaaacttgagatatattttaagtatttccatgtacactatcaacactttaatgcacatacaaaaagatcaatggcataaaatagtgctatgctaaatatattatagaacacatggaaaaattcacagggcaccacaagccattgcctctagtaataaaacacaaatatgacataatttaaagttgtgtcataacatctttcattcgtgtgtgtgtgtgtgtgtgtatgcatgtcatagacaaaatgacctttttagtccagtcttccctaatccctccacaagctcataactgagggatgaagaatcaatgatgaggatgagtgtgaatatccaaatggctgctggaagactgggcaaccatagtgataacaagttgttggttttcatcaactctcactcccactattcacctcaaacaaagctacttctacaattacctgtgttattactgctattactatactacccgtaataacaaccttggacaattgtcaacagacaattgacattctcttgattcgtaaattttgggtcaaaacctttatgagagctctatttttttacctttaacttaaaatacacatgaaagtttaagcaaatgcagttttaagacaagtctccttgacatctttccttttccaataaatttacctgatttttgcatccatatgaaagtaacagagccaacaagtaggataccaatctcagtgagacatgatggtggactgaaacagggatggagtaaagtcaaaagatttgaaagatatttaggtaataaaactgctagaacttggtgattagatatgtggaatgacaatctaacacatactactagaaatgggttttccattcccttctaatctgtctctaacagtagctattagtgaacaactccgtgcaggtgatagagttttaatcaggatgaaatatagcttgatgaagaaaacgtaggtgatccaggggaaaaacggatgtgaagaaagcataaaaataaaaatattcaatcctgtgtagaggatagaagagagaagaagcatttgcaccctgataaagtctgaccaagagaagtagagtcaattaacatctaaatgaaataaatactgattctcttagactaaactttcactaaatgctgaatttcaccctttgttcatgtaagcctctggttgtaaatgaggggtgaatcatccccctccctctaggggcagttgacaatgtctaaagacatttttgctgtgataacacgggtcaggatgttagcactactggaatctcatacatagagaccaagggtgttgctaaatatcttataatgcacaagatagccccctacaacaaataattatccagcacaaatgtcaatggtgccatgtttgagaaaccctagaattcactgacataagaaatatcaaattagacacccagacactgtcatgttgtgggaggcactaagaaaagaaagtcataggtcctgcccatgaagaagaaatggcttaaatttattaattttcaatataagagcaactattcaaataatagcacaggtagtaataagacatatgtcataaatcagtatgtctgtgattgctacataaatggtatctatgataagtgctcaatctatatttttatagagtggagagcaaaagtcagcctagaaaaaaaaaccatacctgttttgtgaacacagcatttctgaggtgtctggaggagaaataacttaggatttcgctaaaaaaaaaaatagtcatgtgaaacagacagaaaatattctattttgggaaattttatgagttttccagagaaaaaaagatatactccattgcttaaggccagattcaggatggtcttatattttttttacctagaagtggagttttgagcagtaaagtgacagaatgaaatttatctttcagtaaaagcaattaggtggcagtaggtggaaccaactgtatatcagaggcattgtggacaaagagagatcaagaagaaaaaatgtttgaatagtgacataaaagattcttgcaaaaaaatggtggctctgagtaagaagacaaaacatatagtaagatcaacctgagaatcaggaatggacaggattatccaaatgtcaataaaagcaaagagtgtataacagaaagtaatttgttttgttaaagggagtattaaagatcctcatgcacgtgtaaaactaataaacttcttatgcctttcttttactaaaaaaccttacttacaccaacttgaccatcatctgctgtgactttttttttttttttggaaataatggtaatccctggtaactagaggtaaagaatgactacatatgattataatgacaggtatagcaactacttttaaggcaccatgtagaattcttttagcttcatctggcttttattccagcacctggacaacggtcctgcataagctatgtccagcatcctgtaggtaacttttgaccacactttgtctcaggtctgtgttgtgtgcctcctccctccttactctggacttttccaggtaggatcccactgggatctgcttgatgtccatattttcacaacctgagggtaaataagagttaactccccatgtgggcacacagtaagcaatcaaggacagaagccagtagatgtatgctccccacccaaaccttgcctacatgagattgcaaggtgtagattatattgtttctcaggtagtcctataaaatttaagaaaccaatcacctctatcagtagccaactaaagaagacatctttgcattgcctctttcctgtttctgcttcctttccctgtcactctcgtttaatctctggggtcaaacactagaataaagcatttgtccttaaccctgtgttccaggtatgctttgtgaagaacttaggtaaaggcaatcatgatgacattgatgatgatgacaataacatctaatattgcggaaacatcattctcatttttacaggtgaagaaactaaggaagataaatgttgccttcatttcctcttaataagttaagtcacaataaagaaaaaacaaaacaaaaaataaaataaaattaagttataaggtcttgctaatgaggctacatgtttactcattgacatttcccctcttgaaataaaacaagataagcacaagggaaaaataggtggctacgttaagtaaacatttctagtttgttttggtcacagatgaaacacagattcagtgagcacattacaaagtagactttaaattacccattatttattatcattgcattaattctagtagtggagttatttatttatttgtggctactatttgagaagtattcttcaataccagattgacttttaaaatttgagaaataatggcattctggggacagaatagcaagcaccttattgggtgatgagtcatgtcttcagggtatatattagctgcttctggcagtcctcagcatttgaggagtatcttaatgatgcttctccaaagcatttttaaaaatagaaaattaatgaataaacataaaacattatttacatttcttcttgagatacttaatttttgtgtttgtgacagctttggcatgccaggtaggattttatgactctgcaagaactatagcattattgggcttggagtgccctctaatgcagaaatgactccggtggccgaaaacatagatcaagacgttcaattcccatcaaaacacctggaaagctttccaaagaaggactggtacagcaaagactacaataaatactactaactccccagacattgataggcatccaaaggcatcaaggccgttcgagaaaatatgatctcaccaaacaaactaaataaggcaaccatcaccaattctggagagagagagatatgtgatctttcagacagagaattcaaaatagctgttttttgtttgtttttttggcttttttttttttttttttttttttttggaaacagagttttgctcttgttgcccaggctggagtgcaatggtgcgatctcagctcaccgcaatctccacctcccgggttcatgtgattctcctgcctcagcctcctgagtacatgggattacaggcatgtgccatcacgcctggctaattttgtatttttagtagagatgaggtttctccatgttggtcaggctagtctcgaactcccgacctcaggtgatctacctgcctcggcctcccaaagtgctgggaatacaggtgtgagccactgcacccagctgataatagctgctttgaggaaactcaatgatatctaaaataacacagagaaataattcagaatcctatcagataaatttaacaatgaaatggaaataactaataagaaccaagcaaagattctgaagcagaaaaatgtaattgacatactgaagaatgcatcaaagtctctcaagaacagaattgatcaagcagaataaagaattagtggtcttgaagatgggctatttggaaatgcccagtcagagaaggccaaaaaaaaaagaagaatgaaacacaactacatgatctagaaaacagcctcaaaagggcaaatgtaaaagttattggtcttaaagaggagatagagagagagagatcagggtagaaagtttattcaaagggataataacagaaaacatctcaaacctagaaaaagatatcaatattaaagtacaagaaagttatagaacacaaagcagattttaccaaaataagactacatcaagacatgtgataattaaactcccagaggtcaagaataaagaaaagatcctaaaagtagcaagataaaagaaacaacatacaaaggagatccaataaatctaccagcaggcttttcagtggaaactttacatgctgggagagagtggtatgacatagttaaagagctgaaggaattaaaaaacctatcctagaatagtacaaccagcaaaaatattcttcaaacatgaaggagaaataaaaactctcccagacaaaaacctgaaggatttaatcaatgccagacctgttctataagcaatgttaaagggaattcttcatccagaaaaaaaaggatattaatgagcaataagaaatcatctgaaggttcaaaactcactggtaatagaaagtacacaaaaaacgaagaataacataacactgtaattctggtgtgtaaactacttatatgttgagtagaaagactaaaatgtgaaccaatcaaaaataataactacaacaatgtttcaaggcataggcagtacaataagatataaatagaaacaatcaaaagtttaaaaacccaggagataaagctgaagtgtggagtttttatttttgttagtttttttctttgtttgtttgttcctgtaatcagtgtcatcattagtttaaaataatgagtgataagatattattcacaagtctcagggtaatctcaaattaaaaaacatacaacagatacacaaaatataaaaagcaagacattaaaaccaccagcaaaaatcgctttcactaacaggaagacagaaaataaggaaagaagaaagaaaagatcacaaagcaagcagaaaacaaataacaaaatggcagagttaaattcttacttataaataataatattgaatgtaaatggactaaactctccaatcaaaagacttagagtggctgaatgaattttttaaaaaaaatgcctgatgatatgttggcaacaagaaacaaacttcacctataaagacacacgtagactgaaaataaacagaaaaagatatcacatgcaaatggaaaccaaaaaagagcaagggtcattatacttacatggaacacaatatgtttcaagacaaaaaccataaaaagagacaaagaaggtcattatataatgataagtggccaattcaacaagaatatatacaattgtaaatataatacgcacacaatacggaagcacctagatatataatgctaattggattagagctaaagagagagagagacccaaatacaataatagctagaagtttcaacaccacactttcaacaatggacagattatccagacacaaaatcaacaaagaaatattggacctaatctgcactgtaaaccaaatggacctcatagatatgcacagaacatttcaaccaatggcagcagaatacacattcttctcctcagcacattgatcattcttgaggctagaccataggttatgccacaaaacaagtcttaaaaatttcaaaaaaattgaagttacatcaagtatcttctttgcccacaaaagagtcaatctagaggtcaataacaagggggattttggagactataccaaaatatagaaattacacaatatgtttctgaatgaccagtgggttaatgaataaataaacagaaaattttaaaacgtttttaagcaaataacaatggaagcacaacatatcaaaatgtgtggcatacagcaacagaagtacaaagagtaatttttttttattatactttaagttttagggtgcaaagagtaaattttaagcctataagtgcctacatcaaaaaagtataaaaacttcaaattaactatctaatggtgcatcttaaagaactagaaaagcaagagcaaattaaaccccaaatttgtagaagaaagcaaataataaagatcaatcagaaataaatgaaattgaaatgaaaaaacaatacaaaaggccaatgcaataaaatattggttttttgaaaagataaaactgacaagcctttagcagacaaattaagaacagagatggcccaaataaataaagtcagagcaaaatacagagaatctagaatagatagagaaattcttagacatagatgtctgcctaccaagagtaagccatgaagaaatttgaagcataaatagaggctgggcacggtggctcatgcctgtaatcccagcacttttgcgagaccaaggtaggtggatcacttgagggccagagtttgagaccagcctggccaacatagtgaaaccccatctctagtaaaaacacacacaaaaaattagacaagcatggtgacatgcaattgtaatcccagctactcaagaggcggaggcaggagaatctctttcatgtaggaggcagagactgtagtgagctgaatttgcaccactgcactccagcctgggcaacagagtaaaactccatctcaaaaaacaaaacaaaacaaaaaaaacacataaatagaccaataacaaataacagatttaaaccataaaagactgtatcacagcaaagaaaagcctgggacctgatgaattctttgctgaattttagtttgaagttgggtagagtgatgcctccagctttgttcttttagcttaggatgctatattagtctgttttcatgctgctgataaagccatacctgagactgggcaattttcaaaagaaagcaatttaatggacttacaattccatgtagctggggaggcctcacaatcatggtggagggtgaaaggcatgtctcacatggtggcagacaagagaagaaggttgtgcagggaaacacctccttatataattgtcagatctcatgagacttattcactgtcatgagaacagcacaggaaagacctgcccctgtgattcaattacctcccaccaggtccctcccacaatacgtgggaattcaaggtgagattttggtggggacacagccaaaccatatcagatgcattggctattcaggctctcttttggttccatatgaattttaaaatagtttttttctagttctgtgaagactgtcaatggtagtttaatggaagtaccattgaacgtataaattgctttggatagtatggtcattttaatgctattgattcttcccatgcatgagcatggaatgtttttccatttgtttgtatcgtctctgatttcttcaagcagtggtttgtagttcacctctcctgttcactgtattcctaagtattttattatttttgtggcaattgtgaatgcgagtttgttcgtgatttggctcttggcttaactgttgttggtgtataggaatgttagtgattttgcacattgattttgtatcttgagattttgctgaagttgtttatcaccttaagaggcttttgggccaagactacagggttttctacatataggattatgtcatctgcaaacagaaataatttgactgcctctcttcctgtttgactgccttttatttctttctcttgctgactgcctggccagaagttccaatactatgttgaataggagtggtaaaagagggcatccttgtcttgtgctggctttcaaggggagttcttccagcatttgcccagtcagtatggtgctggttgtgggtttgtcacagatgactctcattattttgaggtatgatccatcactacctagtttattgagagtttttaaaatgaaggaatgttaaattttatcaaaacacttttctgcatctattgagataatcatgtggtttttgtcttagttttttgcctttgtttacgtgatgaatcacatttattgatttgcatatgatgaaccaacctagcatctaggggatgaatcctacttactcatagtgaatacactttttgatgctgaatttggtttgccagtatttttttggattttttgaattgatgttcatcaaggatattggcctgaagttttcttattttgttgtatctctgccaggttggtaccaggatgatgctgatctcatagaatgagttatggatgagtcctcttcttcacttctttggaatagtttcagtagagatggtatcagctcttctttgcacttctggtaaatttcagctgtgaatctgtcttaccctgagctttttaaggttagtaggctatttattactacctcaatttgaaaacacacttttggtctgttcaggaattccatttctacctggttcagtattgggaaggtgtatgtgcccgtgaatttattcatttcttctagattttctagtttgtgtctatagaggtatttataatattctccgatggttgtttgtatttctgtggggtcagtagcaatatctcccttatcatttctgattgtgtttatttgaatcttcccctcttctttattagtctagctggtggtctaactctttcacttatttattcaaaaaaaaagaaaacacctcctgaatttgttggggttttgaatggtctttcatgtctctatctcctccagttcagctctgattttggttacttcttgtcttctgctaagtttgaaatttgtttactctttgttctctagttcttttagatatgatgttgggttgttaagatctttctaattttttgatgtgggcacttaatgctataaattttcatcttaacactgccttagctgtgtcccagagattctggtaggttgtatctttttttctcattagtttcaaataacttcttgctttctgccttaatttcattattttcccaaacgttattcaggagcaggttattcaatttccatgtaatcatacggttttgagttaatgtcttagtcttaagtactaatttaattgtgctgtggtctgaaagactgtctgttgtgatttcagctcttttgcatttgctgagtaatggtgtaattctcattatgcgattaattttagagtaagtaatatgtggcaatgagaaaaatgtattttcagttgttctggggtggagagtttggtagatatttatcaggtttattttaatccaaagctgagttcaggtcctgaatatctttcttacatttctgtctcaatgatctaatattgacagtggggtgttaaattcacccacttttattgtgtgagtctaagtctctctgaagatctccaagaaattgatttaccaatatgggtgctcctatgttgggtgcatatatatttaagatagttagctcttcttaggttggtaataacaagcttctccaagctaaaggaggatatttgaaaccattgcaaggaagctaaaaacttgaaaaaagattagacaaatggctaactagaataaacagtgtaaagaagaacttaaatgacctgacggagctgaaaaccatggcacaacaacttcgtgacgcatgcacaagcatcactagccaatgggatcaagaggaagaaagggtatcagtgactgaagatcaaattaatgaaataaagtgagaagtttagagaaaaaacagtaaaaagaaacaaacaaagcctccaagaaatatgggactatgtgaaaagaccaaatctacatttgatgggtgtacctgaaagtaacagggagaatggaaccaagttggaaaacactcttgaggatattatccaggagaacttccccaacctagcaaggcaggccaacattcaaattcaggaaatacagacaacaccacaaagatactcctcgagaagaacaaccacaagacacataattgtcagatgcaccaaggttaaatgaaggaaaaaatgttaagggcagccacagagaaagggcgggttacccacaaaggaaagcccatcagactaacagcagatctctcagcacaaattctacaagccagaagagagtgggggccaatattcaacattcttaaagaaaagaattttcaacccagaatttcatatccagccaaactaagcttcattagtgaaggagaaataaaattctttacagataagcaaatgctgagagatttgtcaccaccaggcctgccttacaagagctcctgaaggaagcactaaacatggaaaggaacaaccggtaccagccactgcaaaaacatgccaaactgtaaataccaccaatgctaggaagaaactgcatcaactaacaggcaaaataaccagctaacatcatagtgacaagatcaaattcacacataacaatattaaccttaaatgtaaatgggctaaatgccacagttaaaagacacagactggcaaattggataaagagtcaagacccatcagtgtgctgtattcaggagacacatctcacatgcagagacacacataggctcaaaataaaaggatggaggaagatctaccaagaaaatggaaagcaaaaaaaagcaggggttacaatcctagccgctgataaaataggctttaaaccagtaaagatcaaaagagacaaagaaggccattgcataatggtaaagggatcaattcaacaagaagagctaactatcctaaatattatatgcacccaatacaggagcacccagattcataaagcaagtccttagagacctacaaagagacttagactcccacacaatcataatgggagactttaacaccccactgtcaatattagacagataacaagacagaaggttaacaaggatatccaggacttgaactcagctctgcaccaagcagacctaatagacatctactgaactctccacccaaaatcaatggaatattcattcttctcagcaccacatcacacttactttaaaattgaagcaaagcactcgttggaagcaaagcactcctcagcaaatgtaaaagaaaagaaatcacaaagaactctctctcagacgatagtgcaatcaaattagaactcaggattaagaaactcattcaaaaccacacaagtacatagaaactgaacaacctgctcctgaatgactactgggtaataacaaaaagaaggcagaaataaaaaagtcctttgaaaccaatgagaacaaagacacaacgtaccagaatctctgagacacatttaaagcagcatgtagagggaaatttgtagcactaaatgccaacaagagaaagcaggaaagatctaaaatcagcaccctaacatcacaattaaaagaactggagaagcaagagcaaacacattcaaaagctagcagaaagcaagaaataactaagatcagagcagaactggaggaaatagagacacaaaaaacccttcaaaaaattaatgaatccaggagctggttttgtgaaaggatcaacaaaattgatagaccactagcaagactaataaagaaaaaaagagagaagaatcaaatacaggcaatcagaaatgataaaggggatatcaccaccaatcccacagaaatacaaactaccatcagagaatactataaacacctctacacaaataaactagaaaatctagaagaaatggataaattcctagacacatacaccctcccaagaataaactaggaagaagttgaatctctgaatagaccaataacaggctctgaaattcaggcaataattaatagcctatcaatcaatcaaaaaaagcccaggacctgatggattcacagccaaatactaccaggggtacaaagaggagctgttaccattccttctgaaactattccaatcaatagaaaaagagggaatccttcctaactcattttatgaggccagcatcatcctgataccaaagcctggcagagacacaacaaaaaaagagaatttcagaccagtatccctgatgaacatcgatgcaaaaatcctcaataaaatactggcaaacagaatctagcagcacatcaaaaagcttatccagcacgatcacgttggcttcatccctgtgatgcaaggctggtttaacatacacaaatcaataaatgtaatctgtcataaaaactgaacaaaaacaaaaaccacatgattatctcaatagatggtgaaaaggcctttgacaaaattcaacaatgcttcatgctaaaaactctcaataatctaggtattgatgggatgtatctcaaaataataagagctatttatgacaaacccacagccaacagcatactaaatgggcaaaaactggaagcattccctttgaaaactggcacaagacagggatgccctctctcaccactcctgttcaacatagtattggaagttctggccagggcaatcaggcaggagaaagaaataaacggtattcagttaggaaaagaggaagtcaagttgtccctgtttgcagataacatgattgtatatttagaaaaccccattgtctcagcccaaatctccttcagctgataagcaactttagcaaagtctcaggatacaaaatcaatgtgcaaaaatcacaagcattcctatacaccaataacagacaaacagagagccaaatcatgagtgaactcccattcacaattgcttcaaagggaataaaatacctaggaatccaacttacaaaggatgtgaaggacctcttcaaggagaactacaaaccacagcttaacaaaatgaaagaggacacaaacaaatggaagaacattccatgctcatggataggaagaatcaatatcatgaaaatggccatactgcccaaggtaatttatagattcaatgccgtccccatcaagctaccaatgtctttcttcaaagaattggaaaaaaaactactttaaagttcatatggaaccaaaaaagagcctgcattgccaagtcaatcctaagccaaaagaacaaagctggaggcatcacactacctgacttcaaactatactacaaggctacagtaaccaaaacagtgtggtactggtaccaaaacagagatatagaccaacagaacagcacagagccctcagaaataaaaccacatgtctacaatcatctgatctttgacaaacctgacaaaaacaagaaatggggaaaggattccctatttaataaatggtgctgggaaaactggatagccatatgtagaaagctgaaactggatcccttccttaaaccttatacaaaaattaattcaagatggattaaagattcaaatattagacctaaaaacataaaatccctagaagaaaacctaggcattaccattcaggacataggcatgggctaggacttcatgactaaaacactaaaagcaatggcaacgaaagccaaaatagacaaatgggatctaattaaactgaagagcttctgcacagcaaaataaactaaccatcagagtgaacaggcaacctaaagaatgggagaaaatttttgcaatctacccatctgacaaggggctaatatccagaatctacaaagaactgaaacaaatttacaagaaaaaatcaaacagccccatcaaaaagtgggcaaaggaaatgaacagacacttctcaaaaagaagacctttatgcagccaacagacacatgaaaaaatgttcatcatcactggccatcagagaaatgtaaatcaataccacatgagataccatctcacaccaattagaatggcgatcattaaaaagtcaggaaacaacaggtgctggagaggatttggagaaataggaacacttttacactgttggcaggagtgtaaactagttcaaccattgtggaagtcagtgtggtgattcctcaaggacctagaaccagaaataccatttgacccagccatcacattactggatatatacccaaaggattacaaatcatgctgctataaagacacatgcacatgtatgtttatcgtggcattattcacaatagcaaagacttggaaccaacccaaatatccatcaatgatagactggattaagaaaatgtggcacatatacaccatggaatactatgcagccataaaaaaaggatgagttcatgtcctttgcagggacatggatgaagctggaaaccatcattctgagcaaactatcacaaggacagaaaaccaaacactatgtgttctcactcacaggtgggaattgaacaatgagaacacttggacacagggtggggaacaacacacaccggggcctgtcatggggtagggggctgggggagggatagcattaggagaaatacctaatgtaaatgatgagttaatgggtgcagcacaccaacatggcacatgtatacatgtgtaacaaactgcacgttgtgcacatgtaccctagaacttaaagtatagtaagaaaaaagaaaataaaataaatccttaaaaaaataaaaaccaaaatatgtataagagaagtatggaaataaattcctgtaggagaaaaggtattgtgtaaactaactgaattatattgtgcaacctagctgaattaaacattaattttttgactaactgttactctaactattgtagctcacatattacaataatttctggctgcttttaaactacatatatgattctgatagaaggagaaactttctgacataaatacaggttacccttaagcaacatgggttttaactgggtgcgtccaattagacatggaattttttttcaaccaaacacagatggaaaatacagccttcgtgggatgtaaaacctgcgcatacagaaagccaaatttttatatatacagattccacagggccaagtgtgaggcttcaccatgcataggtttgggtatttgtggacgtcctggtaccactgccctgcgtatactgaaggtcgactgtactatgcatgagagacttccactttaaaatggcatctggtgatatccaaattccccacaaaagcatttgtaaatactctgaaaaatgcaaaaatgtacaatgctacaaaaatttggtctgcaagaatgtatttacttacttacctaaggaaaccaaattgaaaaatgaaataagtagccttccatgccctatttgcctgaaaatatgtctttggttctcctcaaacttcacccaagtgccatgggaaacagcacaggacaacagctaagagtaaagactctggagtgaggctgtgcttgtaagcatgaatcaggtgcattcgaggttgacatcctggttttatggcaacttggtgcaaacaccaatgatactatttttacagaaggttagagaggggagaaaagagaattcataggcccttgaatattttctacatatggaaacaaatgacacatattgtctggctaaccaaaacccaaaagttaaaaacaaaatatacatctttaagggttagagaaaaggaaacagataggaatagccttaggaattcaaaattggaggaacaatgtagatcattgtgaggtggcttcttttttagcagttaatttggatacattaatcataatcaactctctttaatcagaaattgggatttcctgaggacttttcattaattgcaaaccagagcagtaggcaaattattcttcactgcagatcagagtattcctttgtgggttatgttcgtatcccacagaatgaagttcaaatagaatttttactgaattttgctatcatattaccacacatcccccattaattcattactgctaatagaatacatgtgtgttcctcaaatggtagaccatgaaatgactgagctaatgagtaaaactgagcttctacaggtatagctgggagcatgcaggggaatggtataagggctgttgttctattcagcacagaagcagttaagtcagcttcatattctcctctattttgcactggcttttaatgacattaaatcaaattatattttcttagaagatttaatgtttagcttttctaattttaccttcataatgaaattgtagtagggctgtgtgcagtcatttggataaaattgaaagtgccatcagttatacactctaaacgaaatagcagcctttttgtttaactttagttaatggtcttatagtttcacataaaaactttctacctcctctgttggaatttgactacaagctttgaaactacaagcaaagttgcttatcacaaatggagaattcccagaaacaaaagcttatcttaatgcaattattcaaattaaaatgtttgcatttgatgacacacatatttgaggacaatcgcccaccttttttatgtttacatttagtaattcatgtcctttctgtttcaaggcagcttcactggtacagtggtttccagaatcacttctcacttccattatgaacttcttaaaaactcagtaagaggagcagccttacgcagagaaaggcaccagtgtgaaactcactgaccaaaatgtttttcaggttctgaagctactaagcagacatcattgcccaaattcttaagttctccaaggctcttgtttcttcaactatgagactaagtaccaatagtaattattagtgatgttgttactgtcattctgaaaataatagtaagtagctaatatttactgggtatttgccatgtgtcacattgtgagctgggcacttgtctctgtaagatctcatttcattaccgtgagagctttatatacagtcaatgatttcttcattttactgatgaagatattgaggttcagagaggtttggaaatttatgtaagctctcacagctagcaaaggtcataaccagaaaactaaataaggtctgaattaagaataaaagacattgaaagacgctttaagtcctaaaattcagagtaaaataggagtcactgactgaattttaactttacgtaaaatatgaaaattatacttatgaaacatccatatttctaaaaataatttcctgttggaacatctttataattatatacaacatagtttaatttataaacttattttagatgtacagctaccatttgaaaggagaacgacctctaatttttatatgaaataccatgcagtataatattacttcttgttaattttcaattaacaattttccttttttaaatcatgtctccaattattgtctgtgccctttttcggctgtgcaactgaaatctttgactgaagtgtaatttcattatttgtaaaggcagaaacaatggaactgtctgtgctcatattaattttagtagagcgtgcactctaaaatatttagccagagcaacaaagtttatgtcaatcctagttattatcagcctagaaatctcttggaactagaatccattgtaaagtcaaattaaaggtttctgtctcttggtaaagcaggactctctcacttattacatttcaaagaacaataaactgcttatataattttcttcacaccatgttggaacttatccttatgcctttgctcacactgagttgggcttaaaatatttcctcctcctttgtaaagtcttagatatcctttcatttattctttaagactcatctttgtgtcaccttctaagacatcttctttattgccctactaaaaaccacatatacctactcccaggcaaaatgatgcccctttataaagatctttattgctgcacatatggtattacggtacaattaacagtttatatgtcattcttccttacaagacagaatattgtttcaggaaggttttttgttttttaagtgacagcctctctatgcacctaggctggactgcagtggttactcatggggacaattatgggacattatattcttcacatcctgagcaaactgatgctcctgccttggcctctggagtagctagaactgcagacatggatcaccatgactggtttcaggtagcttttgagtgtagaagaataacccaatagttgcctgatctaggctgcctttttggcctattcttcatcaagctgtgggtcagagtgggcatgagtccttgcttagatctctatgtgtattacttctggggcacagttctacttatggtgacggaggaacaatcaataaatcaacctgcactgcacaagcacattttgtacaactgctttcatcacatctgctaacattgttttggcaaagcaaatcatatgaacaaacacaacatcagggtgcagccccagaggaggctgtgagtgcatattatcatgacaaggaagtgaagagttgtgaccaataggtcaaatactatagaataacaaccagttctcatttatctttatgtgtatatccagtgcctgggactatacttgaccattgtgagtcctcaagacatgtatgaagaatgaatgctctgacactgctgatagtgttcccacactcattcgttctgtgaggcatactccaaaccacatcaaactaccaaagatttgaaacacaggatgttgaactccccaattatatttatcgagacattcaacagcttccaaacagaaatacaaagatagagattttcatacagtaaactgttaggttataatttgggcagaagaacataaagttgtagccttagacatggaatttattcatttccgtttgtggtatattgttttccaaaatgcctacaacgatacctcctttcccatgtgtgcctttgcaataggaccatgccacccatcccagcaaggggtacagtctgtttctaccttccttcaatctaggatatccttgcgacttgcttgaccagtagaatgtggtggaagtgaccctatgcagttatgggtctacgtcttaagaggtcttgcaatatttttctaagaggtcttgcaatatttttcttagtttctgcagaattttatcttttacataaagaaacacaggcaagacaactgaataatgagcaaccatgtgaagagagccaagacacatggaggaggaccaaaagaccctaccagcattcaccaccagtagaccatcttggatcccttggccccagttgaactttttcagccaataccaggtgaaacagagacaagccgtcccctctgagcactgcctgaattcctcacccacagaatcatgagtaataaaacagttattttaagtttctaagttttggagtggtttataatacagcaataggtaactaaaagagctcaaaactactcctaaaagaacagagaaaattgatactgagaactctgacataaaccagctggaatcattttaaaaataactgttacagaattgccacatctgaaataatgaacattttgaattgattcctaaaaaaataagcacagaaaatttcagactaaaagatagccaacctccaagtatttcttgtctaaacatgaatatatggatataaatattgttcacttagacttttttagaaaaatcatcaaaatgtcaaagcattttaaacattaataaatatgatataaataatatatttaagtatattataatttaaagtgttttcacttttgtataatctttgttccattaaaaaaaaccttcaatttctataaacatttaaactcatataaaaatagttattagtaagtaagtcaactaggagatggattcccagcaaaattcaactagctatttctgggacagtccactgataatatgaacttaagatcaactgatcttctgaaaggtacaatttcaaatcaagcagaagaggtaacagtttttaggaattcttttttttccaatttagtgagataaaaatgcgctcatttagatgccaaaatcatttaaagcttgtgtaatgaatgtaaaaataaatacactctaagactgaattcaattccacctgaatatattacagggagaatatgtcacatccaatattgagggaaacacgaagcttcttaggaaatgtaaatatttctactttagcaagtctaatctcattcatcatcatcagtgtgtcccctccaccccaaccaaaaaagaagaagaagaagaaatagtttggaaagagtccaaagatcattcaaagtgaaccaaaaaaaatcctattaattttgcattttgcaaaaaggagggaagagccaagatggccgaataggaacagctccggtctacagttctcagtgtgagcgacgcagaagacgggtgatttctgcatttccatccgagctttgaagagagcagtggttctcccagcacgcagctggagatctgagaacgggcagactgcctcctcaagtgggtccctgacccctgacccccgagcagcctaactgggaggcaccccccagtaggggcagactgacacctcacacggccgggtactccaacagacctgcagctgaaggtcctgtctgttagaaggaaaactaacaaacagaaaggacatccacaccaaaaacccatctgtacatcaccatcatcaaagaccaaaagtagataaaaccaccaagatggggaaaaaacaaagcagaaaaactggaaactttaaaaagcagagcgcctctcctcctccaaaggaacacagctcctcaccagcaacggaacaaagctggatggagaatgactttgacgagctgagagaagaagacttcagacgatcaaattactccgagctatgggaggacattcaaaccaaaggcaaagaagttgaaaactttgaaaaaaatttagaagaatgtataactagaataaccaatacagagaagtgcttaaaggagctgatggagctgaaaaccaaggctcgagaactacgtgaagaatgcagaagcctcaggagctgatgcaaccaactggaagaaagggtatcagtggtggaagatgaaatgaatgaaatgaagcgagaaggaagtttagagaaaaaagaataaaaagaaatgagcaaagcctccaagaaatatgggactatgtgaaaagaccaaatctacgtctgattggtgtacctgaaagtgacggggagaatggaaccaagttggaaaacactctgcaggatattatccaggagaacttccccaacctatcaagacaggccaacgttcagattcaggaaatacagagaacgccacaaagatattactcaagaagagcaactccaagacacataattgtcagattcaccaaagttgaaatgaaggaaaaaatgttaaggacagccagagagaaaggtcgggttaccctcaaagggaagcccatcagactaacagcggatctctcggcagaaaccctacaagccagaagagagtgggggccaatattcaacattcttaaaggaaagaattttcaacccagaatttcatatccagccaaactaagcttcataagtgaaggagaaataaaatactttacagataagcaaatgctgagagattttgtcaccaccaggcctgccctaaaagagctcctgaaggaagagctaaacatggaaaggaaccaccggtaccagccactgcaaaatcatgccaaaatgtaaagaccatcaagactaggaagaaactgcatcaactaacgagcaaaatcaccagctaacatcatagtgacaggattaaattcacacataacaatattaactttaaatgtaaatggactaaatgctccaattaaaagacacagactggcaaattggataaagagtcaagacccatcagtgtgctgtattcaggagacacatctcacgtgcagagacacacataggctaaaataaaaggatggaggaagatctatcaagcaaatggaaaacaaaaaaaggcaggggttgcaatcctagtctcggataaaatagactttaaaccaacaaagatcaaaagagacaaagaaggccattacataatggtaaagggatcaattcaacaagaagagctaactatcctaaatatatatgcacccaatacaggagcacccagattcataaagcaagtccttagagacctacaaagagacttagactcccacacaatcataatgggagactttaacaccccactgtcaacattacacagatcaacgagacagaaagtcaacaagaatacccaggaattgaactcagccctgcaccaagtggacctaatagacatctacagaactctccaccccaaatcaacagaatatacatttttttcagcaccacaccacacctattccaaaattaaccacatacttggaagtaaagctctcctcagcaaatgtaaaagaacagaaattataacaaactatctctcagaccacagtgcaatcaaactagaactcaggattaagaatctcactcaaaactgatcaactacatagaaactgaacaacctgctcctgaatgactactgggtacataacgaaatgaaggcagaaataaagatgttctttgaaaccaatgagaacaaagacacaacataccagaaactctgggacacattcaaagcagtgtgtagagggaaatttatagcactaaatgcccacaagagaaagcaggaaagatccaaaattgacaccctaacatcacaattcaaagaactagaaaagcaagagcaaaacacattcaaaagctagcagaaggcaagaaataactaaaatcagagcagaactgaaggaaatagagacacaaaaaacccttcaaaaattaatgaatccaggagctggttttttgaaaggatcaacaaaattgatagaccgctagcaagactaataaagaaaaaaagaagaatcaaatagatgcaataaaaaatgataaaggggatatcaccaccgatcccacagaaatacaaactaccatcagagaatactataaacacctctatgcaaataaactagaaaatcaagaataaatggataaattccttgacacatacaccctcccaagactaaaccaggaagaagttgaatctctgaatagcccaataataggatctgaaattgtggcaataatcaatagcttaccaaccaaaaagagtccaggaccagatggattcacagccgaattctaccataggtacaaggaggaactggaatcattccttctgaaactattccaatcaatagaaaaagagggaatcctccctaactcattttatgagaccagcatcatcctgataccaaagccgggcagagacacaaccaaaaaagacaaatatccttgatgaacattgatgcaaaaatcctcaataaaatactggcaaaatgaatccagcagcacatcaaaaagcttatccaccatgatcaagtgggcttcatccctgggatgcaaggctggttcactatatgcaaatcaataaatgtaatccagcatataaacagaaccaaagacaaaaaccacatgattatctcaatagatgcagaaaaggcctttgacaaaattcaacaacccttcatgctaaaaactctcaataaattaggtattaatgggacgtacttcaaaataataagagctatctatgacaaacccacagccaatatcataccgaatgggcaaaaactggaagcattccctttgaaaactggcacaagacagggatgccctctctcaccactcctattcaacatagtgttggaagttctggccagggcaattaggcaggagaaagaaataaagggtattcaataaggaaaagaggaagtcaaattgtccctgtttgcagacgacatgattgtatatctagaaaaccccattgtctcaggccaaaatctccttaagctgataagcaacttcagcagtctcaggatacaaaatcaatgtacgaaaatcacaagcattcttatacacaaacaacagacaaacagagagccaaatcatgagtgaactcccattcacaattgcttcaaagagaataaaatacttaggaatccaacttacaagggacatgaaggacctcttcaaggagaactacaaaccactgctcaatgaaataaaagaggatacaaacaaatggaagaacattccatgctcatgggtaggaagaatcaatatcgtgaaaatggccatactgcccaaggtaatttacagattcaatgccatccccatcaagctaccaatgactttcatcacagaattggaaaaaactactttaaagttcatatggaaccaaaaaagagcctgcatcaccaagtcaatcctaagccaaaagaacaaagctggaggcatcacactacctgacttcaaactatactacaaggctacagtaaccaaaacagcatggtactggtaccaaaatagagatatagatcaatggaacagaacagagccctcagaaataacgcagcatatctacaactatctgatctttgacaaacctgagaaaaacaagcaatggggaaaggattccctatttaataaatggtgctgggaaaactggctagccatatggagaaagctgaaactagatcccttccttacaccttatacaaaaatcaattcaagatggattaaagacttaaacgttagacctaaaaccataaaaacccaagaagaaaacctaggcattaccattcaggacataggtatgggcaaggacttcatgtctgaaacaccaaaagcaatggcaacaaaagacaaaattgacaaatgggatctaattaaactaaagagcttctacacagcaaaataaactaccatcagagtgaacaggcaacctacaaaatgggagaaaattttcgcaacttactcatctgacaaagggctaatatccagaatctagaatgaactcaaacaaatttacaagaaaaaaaaaaacaaccccatcaaaaagtggccaaaggacatgaacagacaattctcaaaagaagacatttatgcagccgaaaaacacatgaaaaaatgctcaccatcactggccatcagagaaatgcaaatcaaaaccacaatgagataccatctcacaccagttagaatggcaatcattaaaaagtcaggaaacaacaggtgctggagaggatgtggagaaataggaatacttttacactgttggtgagactgtaaactagttcaacccttgtggaagtcagtgtggtgattcctcagggatctagaactagaaataccatttgacccagccatcccattactgggtatatacccaaaggactataaatcatgctgctttaaagacacatgcacatgtatgtttattgcagcactattcacaatagcaaagacttggaaccaacccaaatgtccaacaatgatagactggattaagaaaatgtggcacatatacaccacgggatactatgcagccataaaaaatgatgagttcacgtcctttgtagggacatggatgaaattggaaatcatcattctcaataaactatcgcaagaacaaaaaaccaaacaccgcatattctcactcataggtgggaattgaacaatgagaacacatggacacaggaaggggaaaatcacactctggggactgtttggggtggggggaggctggagggatggcattgggagatatacctaatgctagatgatgagttagtgggtgcagcgcaccagcaaggcacatgtatacatatgtaactaacctgtacattgtgcacatgtaccctaaaacttaaagtataataataaaaaataaatttaaaaaataaaggtgaaaaagacacaaaggaaaaaaatattttgcattttgactatagaattagcaacaggaaggcattttaattaaggttacactcatttcatattatattttctaatctgttattgttatgaggcatatgtgctcctggcaatatggtgaagagaatctctctgaatattgatctttcttcctgagggaaagtgctcatgatttctatggcgagactagtgggggccatggagtgaagtggcacaacgaagagttagaaccgtatacagaaaaaaaattacaactttcatagcagataagacatctaaagcctagtgacagtaaacaacatattcaagatcacccaatattagtaattaagtcagcaacaatgacaagacgggaacttgaaagaaaatttatcatgacataactcacacacctcttaactgaagtggccttataaaggattagagctaaatagccacctgttgtttgagcagtgagttaaaggagagcagtactttgctgaaacaatggcttaaggaagcagtgatgtacatcttcaaataacatgctgtggctgtgtctggcagggaaacaagcgaatgataggctggcttgcacactacattcaaggatgagtggatctttctgtttttgtttttgtttttttgagatggagtctcgctctgtcgcccaggctggagtgcagtggcacaatttctgctcactgcaagctctgcctcccgggttcacgccattctcccgcctcagcctcccgagtagctgggactacaggcgcccgccaccacgcccggctaattttttgtatttttagtagagacagggtttcatcatgttagccaggatggtctcgatctcctaacctcatgatctgcccgcctcggcctcccaaagtactgggattacaggcgtgagccaccgcaccaggccggatgagttgaaagttttctaagcaaagctttcaactatccacagcaactaaacagagaagtcaagacacaaccacgcactacaaaaagccaatatcgttgaccatcatgaaatcattgttatatgagtaccaaatatggaaagactctagggcgtgctttctactttcttgctcctttagatgaggtgtgaccatgtgactggcattcaccaagaaatacaaatagaagtggcatgaaatactttggggcagaaattttaagtgtcagtatgcagtttgcataagagaatgaattcactttgataatgcataaaaatagcaagaattctagcaacccgagaggaaaagtcaatgatctctaactattgagtgataaaagctgtacttgatgcaagcctattaatagagggtgagaattagaagacaggtacacaaatatgacatcgaactacagaaggcagtgggacaagaacactatagaatgaaaaagtgaatcaggagaacaaagggaacaggtattcaaacaaaaccagattcaaagtttgagaaaattgtgtctctttataagatgaaatacaaattttattagagctccaagattattaattatacttgtttacaattaggcttcatcacataatgtaggatttcctttttaaaaattatttgtagaaatttatagggtacaagtgcaattttcttacatgggtagattatgtagtggtgaagttagagcttttactgtatccatcacccaaatagtgtacattgtatccattaagtaatctctcatcatccaccctcctttcatcccttcgcctttccaagtatccattgtctatcatccatcacatcacacaatgtaggatttctcttgctaccgttaaagtccactccagagcaagaccctgacactaaaaaaaaaaaaagtcagaaaagaaataaaaaagaaaagttacaaatatttatccactttccaatggctgttcaaagttatactgcccagagtaagcaaaccagaaaaacagcatcaggtatatggtgttgctctgcccaaatttgtttctgttggtgtggtgcacctcatgaaatagatggcctctagagcacttgtcagttttagaacatgatggatctagatttcactaatgaggtattccagaagctgaatatatcaggagtcttatctcacagatatgtatatatttataattgctttagtttgatctagtgcttactatcatgttggctactatgtactgtctgctagctttcaagttctgtattcacttgaaatgcccatcttataaaagcagtggtatattatgacatacaatgattttaggaaactccactgaagaaataaatttagaattctgtcatgtaagattttaaaaatcaaaaactactggggcttttcctagagattatcattattcctttttattaataataacttctagcccttatggactgtattactatgttcatgttcagctagacaatggtgaggttgaaatctaaagacatttttcaaaggaagactgtgctcttttctttatagcacactgcctctattttattaagcaagggtaactaaaaggttgtcttacaatcttacaaaagatggtctgtcagattccttcccttattcttagccaattctaattgtggtagatttgtttttgtctggtgggttttatgttttttatttacacctctttgttcttggtttcattatcaataatttcttaaatttggaggaggtcagacagttatctagcctctggggactcaactatggtcccttctctcaatgattttaagatgtggtgaacaaattcactacctggtgaagctaaagtgcaggatttcttcactgttctctgagtatgcatgattgtcagatatatcaactttcagataatgaacacatggcaccattgttgtctctgagacttgaggatgaggtgaggaaaaccatcaatagtggttgaatttctacgattccaggattcctataaaccatggacgagatgtcgtagagagggtataagtggagggcaggatgtagagttccacttgtatgtgaaactctgagcttttgactcctgatacataattggatataaacagcttttctatttgtaaaggggaaggcattaggagcttttcagtaaagacttgcatgtctaaaaaagaaaatgggggaagtattttttggtccaaaacaccacaaaaaataaaagtaataactttcaaacaggattaatatgagttatgtctacagaagaagagaggtgactaataaattttacacctcaatgtactctcttattttaatatgaatgtgtagtatatatggctttctcacaggattctcacaacacatcttcaatgttcactgaggacttcttgcttgtttttattattattattatactttaagttttacggtacatgtgcacaatgtgccagttagttacatatgtatacatgtgccatgctggtgtgctgcacccattaactcgtcatttagcattaggtatatctcccaatgccatccctcccccctccccacaacagtccccagagtgtgatgttccccttcctgtgtccatgtgttctcattgttcaattcctacctatgagtgagaatatgtggtgtttggttttttgttcttgcgatagtttactgagaatgatgatttccaatttcatccatgtccctacaaaggacatgaactcatcattttttatggctgcataggattccatggtgtatatgtgccacattttcttaatccagtctatcattgttggacatttgggttggttccaagtctttgctattgtgaatagtgccacaataaacatacgtgtgcatgtgtctttatagcagcatgatttatagtcctttgggtatatacccagtaatgggatggctgggtcaaatggtatttctagttctagatccctgaggaatcgccacactgacttccacaagggttgaactagtttacagtctcaccaacagtgtaaaagtattcctatttctccacatcctctccagcacctgttgtttcctgactttttaatgattgccattctaactggtgtgagatggtatctcattgtggttttgatttgcatttctctgatggccagttgatggtgagcattttttcatgtgttttttggctgcataaatatcttcttttgagaagtgtctgttcatgtccttcacccactttttgattggttgtttgttttttttcttgtaaatacagacaagcaaatgctgagagattttgtcagcaccaggcctgccctaaaagagcgcctgaaggaagcactaaacatggaaaggaacaaccggtaccagccactgcaaaatcatgccaaattgtaaagaccaccgaggtgtgtttttaattgatgggataaagtaggtacagagaacgaataagcacatggaattgcaaaggttgctttgaagcatgctctattaactgcctattatatataatttcaaatggagttggagggccataaaatcctataagcaacttttaattaaatttaatctataattaattcataatttaattcatattttaataggactgattttaggcttcatatttatagaaaacaataaaaattgtgattaatatagggaaaaaatgatcagaagaaggccaaagataacatccattgcaaaggcatttttgagaagaagactgtataacatccatgcaaaagagctcataaacactaactgcataactagtgtttaaaataagaggtttagagaagccaaataaataatttccaagtagaaggggcggaaaaacttcatttatagggtgccaggatattagtctggaatcaacatgtagaaaatcccagacaaggatatgaagaagattgttaacacgaggctatttaagaatggagaaaaaaaaaaaaaaagaactccctgttaggtaaaaattttcctttccttagggtattagagtggccagttaattatctgccctcttcatcaactttataaaacattttttgagtccttactaggaccagcacttatgctatgataggatcacattgattgtgtcatttagtattaacaatagcacttgcagatcgtaactgtcattatctctccatttttcccggtgaggaaactaaagctttaagatatttctaaatactcaagcttgataatgtatttttataattttatgacaataatagcacaaaaaaagtgtcaggaaatggagctatagtgaaacaaattttttttttttttttttttgagttggagtctcactctgtcacccaggctggagtgcagtggtgagatctcagctcactgcaacctctgcctaccaggtccaagcgattttcctgcctcagcctcccaagtagctgggagtacaggcgcgtgccaccacacctggccaattttttgtatttttagtagagagggagtttcactgtgttacccaggatggtctcgatctcccgaccttgtgatctgcccgcctcatcctcccaaagtgctgggattataggtgtgagccatgtcgcctggcctagtgaaacaaaatttttgtacaattttgaaatgaagtttgtattaatccaaactgggtatttgaaagttataattattaaatataagctctagggcaactaataacaaaatatcttttaaaatatagtaaaagaggcaataaggaaattgaagtgatatactagaaaatgtctatttttaaaaaataaggcagcaatggaggaatcgaggaacaaaaaagacatgaaacacaaaccaataccaacatggtgaacataaatccaacctttccagtaaaagcattaaatgcaaatggatgaaacacttcattcaaaggacagagactgacaaaacaaataaaagcaaaaatgatctaattatatactatctacaagagacacacattagattcaaagacatataaattgaaattaaaggatgaaacagtgtatatcatgcaaatagtacacaaaagagaactcaagtagctatatcaacataaatcattcacacactcttccaaaaaaaagatgagaaacacttcccagtttatttgaccagtattaccataataccagtccaaagaaatcataacccaaaaaaataaataaaatagactgtaaaagaaaaagtgaaaccagagacaaaaatgggcatattgtaatgataaacaggcaagccatctggaagacaaagcaattaaaaacatgtatgcactaatgaaagcacctcaaatacatgaagcaaaaaaaaaaaccagtattgaatggagaaatgaacaattcaacaaaacaatttatgactttaatacctcactttcagtaatgggtagaaaaactaggcaaaatatcagccaggaaacagatgcttgaacaatactgtaaaccaactatatctaacagaaatatatagaatattgcccaacaacggcagaatacacattctacttaaatgtgcatggaacattctctgttataaaccacatgttaggtcataatcaagcctcaataaatataaaatgattaaaatcacacaaagtgtgtttctcaaccatgatggaatgaaattagaaaccacctaccaaaataaatttgggaaattcacaaatatgtagaaattaaacaacatccttgtaaaagaagggtcaaagaagaaatctcaggcaaattacaaatattctgagatgaatgaaaacaaaaacaaaacatcaccaaaatttacaaatgctgctaaagtagtccttagaggaaaatttacagttgtaaatgcctgtgttataaagaaaagttcttaaatcaataacagtcttctaccataggaaaccaaaaaaaatatatataaaaaagagtaaactaaaaccaaagcaagcagaaggaaggaaataataaagatgcaagcagaaacaagtaaaatagataatacaaaaaacaactttaaaaataaacaaaatcatatttgcttttttgaaaaagccaacgttggctgggtgtggtggctcatgcctgtaatcccaacactttggcaggcaaaagtgggtggatcacttgaggccaggagttcaagatcaacctggccaacatggtgaaaccccatctctactaaaatacaaaaattagctgggcgtggtggcacatgcctgtaatcccagctattgggaaggctaaagcaggagaatcgcttgaaccagggaggcggaggttgcagtgagccaagattgcaccactgcactccagcctgggtgatacaatgaaactctgtcttggaaaaaaaaaaaaaaaaagaaaaagtcaacactggcaaacctttagctagagtgaccatgagaaaaatagaagattcaagttattaaaatcaggagtgaaaaagggacttcactgccaaacttatagaacttttatttttaaagattataagagaatgatttgaacaattgtaagctaaaaaaaatttgataacctagacgaaatggacaaatttctgaaaagatgcaaaattgattctaaaagaaacagaaatctgagtagatctccacaaactcttccaaaaaaaaaagatgagaaaacacttcccattttattttatttgaccagtattaccataatactaaaccaaagaaatcacaacaacaaagaaacccacagaccaatgtttcttatgaacattaatgcaaaatcttcaaatgccagcaaaccaaagtgacacttaaaaaaagttatataccatgactaactgggatttagctcaacggtacaaatttgccctaatatatgaaaatcaactaatgtgatacaccgtattaacacgatgaaaactaaaagcacatgatcatttctatagataaagtaaaatcctctgacataatgtaacattgctttgtgataaaaacactcattaaactagaaacagaaggaaactttttcaactgcataaaggccatctacaaaataacaacagctaaaattatatctaattgtgaaagattgaatgctttccttctaaaatcaagaaatagaaataaaatcatccctattcaggatcttgcatttagaaaatgctaagaaattgacgcaaaaaattattaaaactagtaagtatagcaaagttgcagaatacaagctcaatatacaaagattaattgtacttttgtacatcactaatatataatctgaataagaaattaagaaaacaattatatttacaaaagtatcagaataaaataggaataaatttaacaaaaaacatggatcatttgtacaccagaaactatacaacataactgagaaaacatatggaagacaggaggcaggactcacttgtagctcccactcagattaacagaaccacatgtggagactcacattatgaacttttgctccaagacatactgcaggaacatactgggaaaacaaacaaacaaacaaaagattacagaccttttgaaagaagcagcttcctgctgcaaattctgtgatgtgagacagttgaaaaactcagcgcccaaagtgtgagagggagaaagcccacatctgaacacagattctccctggggaacctgaaaatcaagatcacaggagaaagacttaaccttacctaaagctgaaacaaatttagagagccaagtgaaatataaaagcagaagaagcagtgagaagagctggtccaacaggactcttggtccccagggaagctatttctgacttcatctcacagggttcctttgggaggactgccagtagacctggggaaggaccacaggaagcagaaaacttcccggtgaactctttaataattttgaactagcacgaaatttccagggcagaattggtggggggtgggggcggtgaatgtgaagagcaggtacaagcacaaaagacatggcaggcagggatggaaaaggcctgaaagcccagcttgctttctcagtggggaggtttgtagtctgggacaataactcagccctgctcactggccgtctggatgtaaactcggtgctgttgttggggcatggtgaaagtgagcttttctggctacataagagctgggagaggcagatcactgctggcattcccccacttctctggtgacctgtatgatgcagcagaggaagccataatctccccatattacctctctgaagaaagaacttaagagctcaaagacaaagcattcaaattaacctaatccaacaaagacaaagaaaaaaagtttgaaaaacatgaacaaagcctccaagaagtttgggattatgttaaacaaccaaacctaaataattggtgctcatgagaaagatgataaatctaaaaatttggaaaacatatttgagagaataatcaaggaatacttccctggcctttctagagatctagacatacaagtacaagaagctcaaagaacacctggggaattcatcacaaagagatctttacctaggtacatagtcatcaggtaatctaaagtcaaaacaaaagaaacaatcttgagagctgtgaggcaaaagcatcaggtagcctgtaaaggaaaacctatcagacaaacaacagattttttagcagaaaccctacaagctagaagtgattggggtcctatctttatcctcctttaaaaaaaaaaattatcagccaagaatattgtatccagcaaaattaagcttcattaatgagtaaaagataaagtctttttcaaacaaacaaatgctgacagcatttgtcactgccaaatgaatactaaaagaattactaaaaggggttccaaattttgaaacaaattctcaaaatacaccaaaatagaaacttcttaaggttcttaaagcacaaatctcacagggcctgtaaaacaataacacaataaaaaaaaaaaaaaaaaaacaaggtattcaggcaacaaatggcatgatgaatagaaaagtacctcacatctcaataccaacattgaatataaatggtctaatcgctcaacttaagagatacagaatggcagaatggataaaaattcaccaagcaagattctgctgtcttcaagaaactcacctaacataaaaggatttacataaacttaaggttaaagggtagaaaaatatattccatgcaaatgaacaccaagagccaacagaagtatctattcttatattagacaaaacagactttaaagaaagagtagttaaaaagacaaagatgtatattatgtaatgataacaggactagtccaacagaaaaatatcataattctaaatatatatgcaccttacagtggagattccaaatgtgaaaaacaattactactagacccaagaaatgagatagatagcatataataatagtggggactttagtaccccactgactgaactctcatcaagacagaaagtcaacaaagaaacaatggacttaaactatatccttcaacaaatggacttaacagatatttatagaacattgtatacccaatgattgcagaatatacattctattcattagcacacagaacattctccaagatagaccatacgatacaccacaaaacaagtctcaataaatttaagaaaatcaaaattataccaagaactctttcagaccacagtggaataaaattggaaatcaactccaaagggaaccctcaaaaacatgcaaatacaaggaaattaaatagtctgctcctaaatgatccttgggtcaacaatacaatcaagacagaaattaaaaatttgtttgaactgaatgataataatgacacaacctaacaaaacctcagggatagagcaaaagaggtgctaaaaggaaagttcatagcattaaatgtctacatcaaaaagtctgaaagaacacacatatgccatctaaggtcatgccttgaggaactatagaaacaagaacaagccaaacccaaacccaaaccctacagaagaaaagaaataacaaagatcagagcagaactaaatgaaactgaaacaaaaataaatacaaaagataaatgaaagaaaaacctggttcattgaaaagataaacaaaactaatagaacattagtgagattaaccaagacaagaagagagaagatccaaataagctcaattagaaacaaaacagaaaataccacagaaatacaaaagatcattcaaggctactataaacacttttatgtgcatgaactgaaaaacctagaggaaatggataaattcctagaaatataaaaccctcctagattaaaacaggaatagaaactctgaacagaccaaaaacaaatagcaagattgaaatggtaatttaaaaattgccaacaaaaaaaaaatctaggaccagatggattcacagctgaattctatcagacattcaaagatttgataccaatcctattgaaactatttcaaacgatagagaaagagggactctccctaattatgttatggagccagtgtcaccctactaccaaaaccaggaaataacataacaaaaaaagaaaactagagacaaacgtctctgatgaatgttaatgcaaaaattctcaacaaaatattagctaaccaaatccaacagcatatcaaaaagataatccaccatgatcaagttggtttcataccagcgattcaaagatggtttaatatacctaaatcaataaacatgatacaccacataaacagaatcaaaaagaaaaatcacatgatcatctcaatagattcagaaaagcatttgataaaatccaacattgctttatgattaaaactctcagtaaaactggtgtagaagggacataccttaaagtaataacagatatctatgacagactcacagccaacattatactgaatgtgatagtgttaaaagcattcccctgagaacttcgacaagccaagaatgcccactttcaccacttctattcaacatagtattggaagtcctacccaaggcaatcagagaagagaaaaataaagggtatccaaatcggtaaagatgaagtcaaactgttgctgttcaccaatgatattatcatataactagaaaaccccaaagactcatccaaagagctcctaggtctgataaatgaaagtttcaggatacaaaatcaatgtacataaatcagtagcactgctatacaccaagggcaaccaagctgagaatcaactgatagggacaggaggcagggaaattctgggtagaagagggcaggtgcccagtgagggccctgctgattctcatcaaatccctggtctatcatggatagcttggtataattgagaggcttaattctagtcctccattatgcacacctgaaagtgtctcctcttccattctcccatctcatcattgggatcccatttagggtcatccaatggtactgtttctcttccagttggataaagtttgaccccttccctgacactatatgtgatacaaagctcaatcctttctggaaaggctaagaagggctttgataaagcacacctctctatctcctgattcagttgagggacacttaatccctaaatgtatttaaaaatccatgtattactaaaaaataagtggattactcaggtatcccctgatatcaggaggaagctgcagaaatgggccctgagaccagatagtactttagagaacctcctgaaattgaccacttccatcttttataatagagatagggaaacccaagagagagagaggagacacaggaaagaggcagaggcttcaatggccaccatgcaagcccacaaacccagaatccctgaggtgcacctcttaactgctacagatgtggtaagccaggaaattttaggaagaattccccaggcagcatgaggaacccaccttgaccctgtccaatctgcaaaggggaccactggaaggtggactgtcaccagggacactggtaactgggttcagagccaatcgcccaaatggtccagcaggactgatggctcccagggttcctctttccagctccagtggtccagaccaccactaccatccaggagctccagataattttggaaactgaatagagaaaagtggatctccctctgcacaccatggctggtctctcagttctcctctccaatctgagctccctctactctcttagcataactagtgaggggtgtctcaggaagtcctttaatccaatattcttcccaacccgttaattgtagttcaggagacctcttgttcacccatgcctttctaattatccctgaaagcaccaactcctctgttgggtaggaatattctgacccatatggggaccaccatcctgatggccacaggacaaactctttctctctccctagtggagactaatattaacccagaagtttgggcaattcaagggaaaattggctgagccacaaccaccataccggctgggtccaccttaaggctctcacctcctttcctaaccagaaacaatagcccctgaaaccagaagttaagaaaggactagaagccattattgataacttaaggttgcaaggcctcctcaaaccctggaacagccctttaataccccaatattcagggcacaaaaacccagttgggaatggagactagttcagtacctccacctcgttaatgaggctgtggttccaattcacctggtggttcccaatccacattccctactagctcaaatacctaaggaaactaaatagttcacagtcccagacctaaaggatgccttcttctgcctaccattgcaccccaactcccaatatttgtttgcatttgaggatccctccaaataaaccacccagttaacctgaatgatgttacctcagggactctgagatggcccccacgtgtttggacaggcattgtcaagagaaccctctgagttactttatcctcaggtgaaagttttacagtatgtagatgacatacttctctgaacttcaactgaggaaatctctcaggagggcagtaaggctcttcttaatttcctggctaacagagaatacaaggtttcaaaatctaaagctcagctctgtcagacttaagtgaagtacctaggtctggtcttggcagagtggaccagggcattgagcaaagaaaggattaatcccatttcctcctttcctttccccaaaacactcaagcaactgaggggattcttaggcattacaggattctgcagactatggatacctgggtacagtgaatagctcatcccttatatcacctaataaaggagatttggatagctaaaactcactaatttgggaaccagaggctagaaaagcctttgaccaactgaaacaagccttgcttaaggcaatactccttagtcttcccatagggaagatgtttaatctttatacctcagaaggaaagggaatggccttgggagttctaacccacatctggggtccagcccagaaacctgtaggctacctaggtaaggagcttgattttgtagccaaaggagagctggcttgcctccaggcagttgcagcagtagcctttctggttaccagaggttactgagttaaccatagggaataacttaaccatctatactctgcataatgtggcaggactttggttttctaaggggagtctctggctaatgaataactgcctcctcaggtatcaagctctgctattagagggatctgcagtccaaacaaggacctgtccatccctaaattcagccaccttcctcccaggggaagctgagagcttgaacatgactgtgaacagatagtagtatccagccagagagggcctctaggaaacccccttagagaacccagacaaaattctctttatgagtggaaattcttttgtaaaacaagagatccataaagcatggtatgctatagttattctgactgatatttttgagagctcgtctctctcctcgggaacaagagctcaactagctgagctcattgccctcacgagggcactcaaattaagcaaagggaaagcagttaacatttacgctgattctaagtatcctttcctagacctccatgcccatgctgctatctggaaagagagaaactttctcacagctaatgggtctcccattaaataccaacaggaaattaattgactatcatcctcagttttcatcccataggaagtagcagtaacacaatgtgaaggcccccaaaaggaatggataaagtaactgagggaaataggttggaagactaagcagctaagtcagcagagagagggcctcagatttctgatccacttgaagccccactggtctgggagggcctcataggagaaataaaacttcagtattctcctatggaaatagaatggggcacctcttggggttacatctttcagtcctcaggatggccacaattggaggatgccaagcttcatctactggctgccaaacaatggaaagttcttaaaagccttcaccaggcctttcacctgggtaaagataaaacctttcaaatggttcagagattgttctcaggtaaaaacctgacacaaatagttaaacaggttgttaatgcttgcaagatttgccttaaaaatcatcccttcagctgaccacttctgcacccaggaactcaaaggacagcaggctgagggaaaactagcaaatggatttcacccatatgtcaaaggtaaggggcatccagtaccttctagaatgaacagataccttcactaactgggtagagccatttccatgtgggacaaagaaagcctccaaggtggtaaaagtactgattaatgagataattccttgccctggcctgcctaagcaacttcagagagataatggcctctcattcaaggcagctgtgacccagggggggtcacaaaggcactaggaatacactaccatcttcattgtgcttggagaccacgatgctcaggaaagatagaaaagacaaatgatattataaaaaaggcacctcagaaaactatctccctcagactaatcttccctagactaaccttctcaccatagctctactacatatttaaaacagccctttaaagctaggtttgagtccttttgaaatgatgtatggacagccttttctcaccaatgatttcttgctagacaaataaatctctgatttgctagacaaataaatctctgatctttggcccatttccaacaggaactggagcaactgtcagaggcccaatcccatgaatttgggccacttctattcaacccaggggacctagtactgatgaaggtacttccttcccttcctccctctataaacccagattggaagggactttacgctgtacttgtttccactcctacagcactgaaagtcactggaatatgttcttggatttattatacccaagtaaaggcctggaaagctcacagagttacctccatcaacccagaagaccaccgaaagtaacaatgtgaagagatcagagatctcaagttaataattttttaaaaagtgttaataattagcctttcaggtatattctctttatagtcttgcctatgcttgctgttgttaccttcgttctattgtataccacaggttaaaaatggtgatttcagaatgattagtatatttcacttatttctgtaatctttggcacaaaattctttccttttaactcctctttgtgtaatacacatatttgatccacacatacttaactttgtaaaacttgttttttcttgcctagaggccatcaaactccaagctatcaaacaaccggagcctcagacaatggttcccttttgctggggacctctgggaggaatctgactgctgttctgcctaaaacaacaccccctgtcaccaaaaagcctgacaccatgacccaaagtgagaacttatatcattgttttcctgctctaatgttgccttttccaaaaccactcatgttctgtcccacccccatcctgtacagataaaaatcccaggctcagccaacaaaagaggagaagcagctggacgtcagagactatggttgcatgtcggagagaagcagcttaactttaaagagagagcttgatggtgtcacttcagagaggagtctggccagggatggtcagacttcaagggaggattgcctccccaccctgtccccttttcaactcccatcccactaagagtgactttcatcagcaatataatcccctgcatttaccatcttcaattcattcatgcaacctcatgtttcctggatgccagaaaagagctcagagccacaaatgtggtgcaaaaggctgtcacactgaccctccattgagctgttaacactaaagccatccacagatggcaaagctaaaagtccactgtaacagtcattctggggcttcaggggttgtgagcacccttcaagatggtgccatgagtttttctcctattggtgcccaaaagcactcaccctggtttctgcacccactcacctgcatactccctcttgtgaggggttgagaactgtgggatgagtaagtgaggcactcctgtcatgaggcccatgaaggggtcagagaaatatcctgcttcaaaattaataactcaacatcttttacagtagttgcaaaaaaaaaagaaaaaagaaaaaaaaacttaagaatacatctaaccaaagaggtgaaagaccactacaaggaaaactacaaaacactgctgaaagaattcatagatgacacaaacaaatggaaacatatcccatgttcatggatgggtagaatcaatattgtgaaaatgatcatactgtcaaaagcaatctagaaattcaatgcaattctcataaaaataccatcatcattcttcacacaactagaaaaagcaatcctaaaattcacatggaaccaaaaaagagttcacatactcaaagagtaagcaaaaagaacaagtccggaggcatcacattacatgacttcaaactataatgtaatgccatagtcaccaaaacagcaaggtactggtataaaagtaggcacaaagaccaatggaacaggatagagaggacagaaataaagcaaaatacatatagccaaccaatctttgacaaagcaaacaaaaacataaagtggggaaaggacaccctattcaacaaatggtgctgggataattggcaagccacatgtagagaatgaaactggatcctcatctctcaccttatgcaaaatcaactcaagatggatcaaacacttaaatctaagacctcaaaccataaagattctagaagataacattggaagaacccttctatacattggcttaggcaaagacttcctgacttagaacacaaaagcaaatgcaacaaaaacaaagataaatagaaggagcttaaactaaaaatcttcttcacagcaaaagaaataatcctcagagtaaacagacaacccacagagtgggaaaaattctttgcaaactgtgcatctgacaaagaactaattccagaatctacaaagaactcaaacgaatcagaaagaaaaaaaacaaacaatcccatcaaaaagtgggcaattgacatgaatagataattctcaattttggccatatacaatggtcatatacatataaaaaatgctcaacatcactaattttcaggaaaatgcaaatcaaaaccacattgccataccataccaccttactcctacaagaatggccataatttaaaattcaaaaattgtaaattttggtatagatgtggtgaaaagcaaacacttttacactgctgttgggaatgtaaactagcacaaccactatggaatacagtatggaaagcccctgaagaactaaaaatagatctaccacttgatacagcaattctactactgggtatctactcagaggaaaagaagtcatgatatcaacaagacacttgcacacacctgtttgtgacagcacattcacaattgcaaaaatatggaaccagcccaaatgcccatcgatcaacaagtggtaaagaaaatgtggtatgtatatatcatggaatactactcagtcatataatggaataaaataatggcatttgcagcaacctggatatagttggagaccattattctaagtgaattaactcaggaatggaaaactaaacatcatatgttctcacttgtatgtgggagctaagctatgaggatgcaaaggcatatgaaagatacaatggactttggggactcaggaagggagagggggtgagggataaaagactacacattgggtgcagtgtacactgcttggatgatgagtgcaccaaaatctcagaaatcaccactaaagaacttgtttacataaccagacaccacctgttccccaaaaacctatttgaaataaaaataatacttgaaataaacttaaaaaggaataaatggaagggcattaatgtatggattggaagacttagtactgttgcaatagcaatactccccaaattgatctatagattcaatgcaattcttatgaaagtgtcagctgccttttttagaaattggcaaaaagatcttaagattcacatggatgcaagggacccagaatagctaaaacaatctctaaaaggaaggacaaagttggaggactcccatttccaatttccaaacttaatacaaagtgcccataatcaatatagtatggtacttgcataaggacagacatacaggtcaatggaatgaaattttgaatccaaaaatgcacccttctatttatggtgaattgattttcacaagggtaccaaagaagttcaatgagcaaaaatacatctttaaaaaaagacactaagacaactggatataatgcacaagaatgaaattgggctcctatctcacacaatatataagcattaatttttttaagaagagcagagtatgaagtatgagagttaaaactataaaactcttagaagtcaacatagtagtaaatctttgtgaccttgaattaggcaatgattttctagttatgaaaccaaaagcaataataaacagataaaattacactttatcaaagtatttttgcatttcaaaggaaaacatgaagaaagtgaaaaaacccacagaatgggagcattatttgcaaattgtatatctgataggagatttgtatccagaatatttaaagaattcttgtaactcaacaacaaaaagacaaataacccaatttaaaaatagacaaagaatttcaatagctatttctgcaatatacaagtggtcaataagcacatgaaaagatacttaacatcattaatcattagggaaatgcaaattaaaacaacaatgagatacaaatttgcacatactaagatggttataatcaaaaggacagacagtgacaagaattagtgaggataattgaaaccttcatacaatgctggtggaaattttaaattatgcagccacttttgaaaacaatgtgtcagctccttaaaaaaagttaaacacaaagttaccatttgatcaagcagtttcactcctaagtatataatcaagagaattaaaagcacatgtctacacaaaatcttgcagagaaatgtcatagcagcattattcataatagaccacaagtggaaacaatccaaatgtccatcaactgatgaatggataaataaaatgtgtcagatccatacaatgaaatattattcagcaatgaaaagaaatgaaatgtaatacatgttataacatggatgacctttaaaacattatgctaagtaaaagaggccagaaacaaaaaggccacatattgtatgaatccttttatatacaaggtagagtaggtaaatccataaagacaaaaagtcattcagtggttgccaggacctaggaggtatgggagaatggagagaattgctaaagggcatgagctttcctttgggatgataaaaatattcttttaaaaaaactgtatgaggtacaagttcaattttattacatgcataaattatgttgtggtgaagtcaaggctttcagggtattcatcacccaaataatgtacattgtatccattaggtaatttctcatcatccacccttctcttaccctttcacccttccaaggcaccattgtctatcatcccccactctacgtccatgtatacacattatttaactcccacttataagtgagaacatgcaatatttgtctttctatatctgacttgtttcacttaaggaaatgacctccagtcctatccatgttgctgcaaatgacgtaatttttttaatggatgagtagtattccattgtgtatatataccacattttttatccaatcatctgttgatagacacatagattgattccatatctttgctattgtgaatagtgccacaataaacatacaagtgcaagtatctttttgatatcattacttattttctcttgagtatatacccagtattgcaattgctgaatccaatggtagctttgtatttagttctttgagaaatcttcatactgttttctatagaggttgaactaatttatattcccaccaacaacatataagagttcccttatctccacatactcaccaacatctattattttttgactttttaatagtaaccattctgactagaataagatgatatcttgttgtagctataatttgatttcttgctaattagcgaagggatgataaaaatattctaaaattagatactgatgatgcttgcacaaccctgtgaatatacactgcaaaagggtgaattttatgtgtgaattatatctcaataaaatataaaacaatattttaattaataaataaaatacatctgtttacccccccccaaaaaaaaacccagatcaatggctagaaggcaaagaagctagaaaatacactattcctattctaaagctgataatcattttaccatgttgtagatatctctaagtaagaagttgacaaagatcaacaaaaagatgtgttccattccaaaaatttctcgattctatgattcagcgcagaaagattgtgcaagtttatactttagtaatacagaacaaagtgagtactggtgatagcagcagaaggcagacacatttctaggcagacaggggtgagtccccagtaaaactagaccttcaaaccaagcacagcttaaagcctgaaaactgagttaccagcgtccacaaccagagtgagaacttcctcagtgccttttagccaatttaatggtgctttgtccaggcccacttatggaccaatcagcacacactcccccattctgatcccataaaaaccctggactcagccacatattgggactacatgctttcaggtaggggctacccacttcaggtcccctcttgtgtcaagagctgttctgttgtctcttctctgccttgcttattctccagttgtccatgtaacctcattcttcttggacatgggacaagaacccagtacccaccaaatggcaggtgcaaaaaatgctgtaacactgtagccctccaaccctctgctggcaccaggctgttgcttcatgtaacaggaagcagtggcaatggggccaggccagccaagaagctatgagctggaatgtgggcagcaggactgaacaagctgtaaaacaaatgagctgaaacttgctgccctcccacccccattcactgtgctgcaggcagtggaaagaagagagagatgtatcactccttgagggctcagacctcaggactccccaagcaactgtaacaccccttgggctccacagttgctggcatctctgagttttcagaagccactgcagcctccttgtccagacactggcacccaagcagaaatgattcaagacagcacacccggaccagtcatggactgagcacagagttggcaggcactggatccaggcccatagcacaagctgagtgcaatcactgggctgagtgagaggagtaagcctagcagaaaacccagtgccaagcaaagcctgagcaaaggcaccactagccacagagctttcctgctggcaaaggagcaccaaaagaatcctgtgtcatttctgggggtcatctgagatctgcaaaagggtaagtaaaagtggacctctttcactttcatttcgaggcttcttgtcctcagtttttttttctgaaaacagataaagcgctaggcctgtagcagccagttaagaacaaatggcatggctgcagaggatagatttgttggggaggactttcacaacgcaccctcttgtccccatcacccccaggtatcgagaatattggctttgttccaatccagtctcccttcacagaagtctagttatcatgtgggatcaaaataaggtcctggggcaactgaaagtatctggccaagggtacatctctgcattacctgaagcttcctgggccagccctcaatccctgacagcccattcgggtgtcagccaagaccttcaatctttcttatggatttttttttcctttgcagaggtcatagctcctatctcttctttatatacaatgctaagggtgttgttgcaaaccacagagataatatgactgggtagaatgagcatttggctcagtcatcaggagtataattcagaacaatgtggtatgtgtccattcttagaaactaagaggatgtaacaattgagagttttctgtcccctgttaaaggaatcaatttgcatagggcaagagcctatttccccccagccaccttccccttccctgcatttaagggttcctcccactgccccccgcaccttgtcaggagtcaacagcttcaccttagcattgtgcttatgatagagaagcaaccgaggagctgccctactggttgttggctgcaatttgctgaggaccacctgggactagtttaatgggtctgtgtacactcctgaggcacctttttgtcccaaattcaattccaagcttcaggttgaaggcctaaagagggaaaattagatctgagggacccagaggcagtcagagtggaaggctagggcacagcccgagtgagcatgactatccttgctaattaggccttcccacttcactgggaagaactatcatcatgactttgatgtgaaatcagaattaagaactaattctctgaacttacagtgtgaagattacatctgcagagcagacacgcaagtggttctcaggaaccattcagtttttaaaatacaatttctggcagtatgtaagattggtcattacaaaccctgctcctctctccctaccttaataaccaggaccccacttttcaacattctgaatatcaccagtcttagggaaccaagtcctccactccatcaaacacttctagaaactgcttcgtaaaagtatcacttgtgaatccagaagaactgactgacagagcaggagcatcatcatcttggacaagtccctcattctaaagttcaccttaataaaaaccacctaaatccaaagggtatcagcctaatggctaaggtcagcatgaccataaaccacaaataacatctccaaccagaaacattccaaactcctccacaaccagggacatgctagccccgagataaacaccactccaggccagaaggatgtctgccccaagataacctcccctcctcgcaaagagattccaaccctgtcataaacttccccaacacataaatattccaagttgtaataagccccccctccctaagaccaatatatactcttagtctgtaagagaaaactctcctgactgatatcagccaggagtgcctctcaggttttaactaaagaaaacctgtcttagtgttctcattgctcaattcccacctatgagtgagaacatgcggtggttggttttctgtccttgtgatagtttgctcagaatgatggtttccagcttcttccacatccttacaaagtaaatgaactcatccttttttatggctgcatagtattccatggtgtatatgtgccacattttcttaatccagtctatcattgatggacacttgggttggttccaagtctttgctattgtgaatagtgccaaaataaaggacataggatggggaacatcacacaccgggactgtcgtagggtcgggggaggcgggagggatagcattaggagatatacctaatgtaaatgatgagttaatgggtgcatcacaccaacatggcacatgtatacatatgtaacaaacctgcatgttgtgcatacgtaccctagaacttaaagtataatttaaaaaaaggaaaaagaaaacctgtctttaactgccagccacatttcatgtttctttcctctttctttaactcttaaactgactatgttcaataataaagtcaataaacaggtcaaataatataaacatccagttgatgttttctgaatgttaaatttgtaagacaaagagttctacaattctatggaacagggatatgaaagatagtgggaagtagggagaacatcaaagattcaaatgttcataggtctgtaggtctttgtcagatatttatgacatgttctcaggacactgaacaagagccagtgtttgagttcttagaataaagcaaatccaaaaacattagttttcagagcttgaatagaccttagagatcaccaaaccaaactccttattttatgaactagaaaactgcagtgctaagaaaaacaaaaccagatatgattagcttatacagttagttggagatatgggatttgaatgcaggtttcttgattcatggaccagtcattctttggcagttttagttctacctcttcagagcaaccacaaattatttgagagagttgtcctgtcttctttatcaatacaaagtatgcaatctacaggtaaagtccatttaaggaagtttaaattactcctctcggcctcttaagttgttcagagacaatctcggcaccatgaaatatgttttctacttagtctcatagtatcctcttgatttaatactatggagataggttgaatatctcaaaaacatgacttaagaagacaccaagggtcaccggccaatgttcctcctacagaaacaaagaattcaatcttatagataactcaagagaatagaatctcctcatgatcattccctcccacttttcattctgttcttctttgctgcttttaaactcctttccatttcccctttgcttctttatatctctctgctcaaatacataccagaaacattgggaccaagtcagaggtttgaagactgaatattcttttccctttgctcaccacagggactccacctattcatcctaaccaaaatatatgaacaagctgcaactcactgcctactttctattagttccattctcatttgttttaaggcctcggaatattgcatatggataataacataaaaagtaataagtcctctcacaattccttgtgaaataaaaatctagcaatgggggtggggaggattgacagtctaatcatctattataatagcagtattttgttttttgttttaaacaaactgcagtttggaatagcaatctgttttgtttatcatgtcaagttcttatgaaagtatttcagttggatttcacccaaaatctataacacaccatgtaatacataattttgctgtcatatggttgcaaattttgacacttattttgccagaaaatacaggtatgaatatgaaagaggccccctcagagatttattgcttagtatcccagtagttcctcagtctttctttgtcgaagctcaaccagccagtattttaccaagcagattttgttgccctttgtttctgtttagatttccttaaaaattacccttcaaaaaatccataggctaattttttttatttttattgctaattgttcctaattcttcaacattaaatggtataaactgtcttggatattcatagctaaaataaatgcagacaattttacaatttccttgaatggtcatggttgtacaatgaaactttttgttactctttcaattgcacataaaaattactctttttctctttgtctatctacctcaaaattctttgtttcaagtatacaaatgagtcattagtgaaagcaaaatgggtactttttatctaaggaaggttaaaacttaacttactttaaaattcagcattttctgggttaaattagaacactacttcaatatctgcaattcaaataagtcctctgagaaattggcctccataaccagtgacgtgctgctgaactgaacagatctccaaaatatcctaacagatttctttctttcattgtagaattgtttccatctggtgcttagatattaaacctggaatatgtaaaggctctcctctctcaccctgtttgacttccaaatgctggcaaataatttgcattgtcaatgaattgaggattaaaattttgaacttaactgagtagctgcaagatgcaaaatttaaagtgatagatcttcaaagtagtgaatttttctcttttaattttgagaaatggagacttgaaatgttacttgtttgtagaacattctaatttgaactttatttgcttaaaaagaataaaaattttctcaatttttatcccaagttcaggatatcaaaacatgaatttatgaacagtattataggccaaatttttgagtacttaaatcagaatattagcatctaaaaatacttgcatgcatatatttcaagagataagcagatagctatttagacgtatacatgttgaagtttccaagaccctcggtcactgacagtgatttcttcatgaaaattttaaggaggcttcacagtaatagaaaataatgtctgacttttacgattggcaacatttttcatggcattttaactggaaagcacagagttacttctgagaaacataattgcttccagaaatgtttaacccactaggagaatgtttacatgaagtgagcaatagtcacaagaagtgaataaaccaattctatgcacacagcagtgtaaaaagcctggaagcaggcatacagggatctgtaagagaaccaatgcaggacatgatcattctgttcaattgttttcttattgtcagtagtctggcaacttccacccattcccctttaacccagcagttgatagcacatggcttccagagcaaatagtcaaccagttctcttttccaaatcttcacatttaagtctgtcttccccctgaccatgcctttctttctgacattccattatactttcttcacattgtgtctcatttaattgcttcctttaatctctttttcttaaatttgatctgccttgatctggaatattttctgatgcactgaagtaaaactggtcattctccatttcatagctagttaaaaagataactttgagttcctacacacacttggaactgctcaccatctctgccagtgtgctcacatttacttaaaaaaaaaaaagtctaagaagacttacggcaaagcattaccttgagaaggacagttaagaatgttttgctgataggcatataatcacttgactgattttcacaaacatttgtgggaatctgttaaagtatcttagtccagttcggtctcagcaggacccaacatcttgacccaaaggcctccaaacaaaaagattcattaaagtggtgaaaattttccataaaactttaagacatcaaagaactaatttctgtagttccctgccatgcaaaatattacagtataagtttagagctaatattggaactagaataatctagaacagatagatattctcaaaatattgtacatactttaaactaaaatctaaaaaagatccaaaaacacccgttgcagtttgcaacatgagtcttacagaaaattacaatgtgtacttctagctaaaaggagcaaacaaacaaaaatcaacgctaagtgaatgatgtaactgttttgtatcttttcatccactcaaaaagaagaaagaaagaagaaagagagagagagaggaaggaagggaggaaggaaggaaggaaggaaggaaggaaggaaagaaggaaggaaggaaggaagcgaaggaaaagaaggaaaggaaggaaaggaaggaagattttatttcctccgattaaaagttgcattttcttttctgtctccttttttccttcctctcccccatctgcccactgttccctctttccttttctccatttgtatgacagtggcactgattcaaagaaggggtggagtccgaaattttgggtggtcttagtaaagctttagtctttggctaacctctccttaaattggtcagaagccaaaaatttccagtattagggagagtcactttgaaaagttgtatatgcatgtctgtgtgcatgtcaatatatttgctctggcttaacaagaaaaactgaacaacatatccctgtgtaagctgtggttcttatttggtttcagtgttcatttatttcagtttattgtttgacatctcccactagctaagccaggaaactcatggcagatcttcaaaaaataactccactcccacatttctttttttctttgttctgattctttactctctcttaccctcaaaaagtttaatgaaacaagtgttcagggaaagatagtatttgcttattgtatcttattatagttttaagaaccaaacataaagtctcccttacagcttctctgttttattataaaattatacttgattcagatttgttttgaaagaccagtttactttttttaattaaaaagaggaatacaatgtcctttccataagtagactcacaaagaaggtaggagtcattttcttccattaatgtcacaacaaaacagtcttacatactctgaattggagtgaaaattagagaaataaatcacctgcatgatgagcatacattatcatggaatttttaaaggcctcatcttttgggtacctggcaataactaagcaaaaataaccaacagggtaaaaaaatgccaccatcatttcaatgaaaataaccaaactgctcccagaaaacaaagtagcaaatccatttaggctcactggtgcatgtctggaactttccaaatgaaaccttgcatcaaagaaaagtttaaacacttttcttcaagatcagtcaaaactaaactaaaattgcatggcttaaagagttacaaatttccactcttaaaagcaatcttattttggttgcttgcagctggtcccaaagcaagaaatgaaatatttaaaatggaggagtttgcaatatattactggatcctttcttaagtggctatccctccaaagaatgccaaaactttgtagacttgattaggattgcactggagccggactcagcactgcagattagtgtagagcacgttttatccaaagctagcacgcaatgaataagctttatttttaaatgaaaaattccaaagatactgattcacataaagagggagcatttcaagttcacattatgaaaagtcattggtaggaccaacaatacagtatttagtgtagctgttctggaacacaatggagctaaattgattaagcagggatatgagctacaaagtgaatatcagatataacagactaatgctttaaagaactacaagctgctgattctcaatagccttatgagtttttaattcttacattatagaactctataaaccaaatcaccttcaaaatgataataaattgaaaatcttcaaaataatcaatcttctttgaatgtgcttctattcaaaaagaatgtgagaattgagtttttccaaaaagtgacaaacctaatttcagtgatgatgactttttttatttccaactggagaaagaggcaaagatctagttgctatttaagtttgacaaagtctacattttgaggaaatcttattatccttagaatatttagaataatgctagtagttaagagtgaacaatactgtctctgtttctatatagcagaatgagcacatgcatctaattgcaatattatctgacagtctacttaaactatagtaaagtattttttaaaagatttaaacccacaaagacacaaagaataagaataaagataacactgcattgtgagagttgaatgacacacacagacacacacacacacacagagagagaaagagagagattgactaacggctatttcctcccactagtagttatgggaaacttagggtaaaatctaatttatgtcagagaatactcaaaaggcataggaactaacagcaacaggtgactttataatgagggtttatgggagacaggagataaaataaagaggcccagagaaaagctttttgagaaacaagcagatctcaggatcctctacttgattccatgttgctgagcaagtgccctaccagcacacgtgtagaatgctggaagcttattttctagaaatgattaaaaaaataaataaataaataaataaaagaggatactttcatttcctgtggttgtagtaaaagaagtcaccacaaatgggggtttcaaacttcaaaaatgtattctctctcagttctagaggtcagaactctaaaatcagtttcactgaatcaaatgcaaggtgttggcaggacctcatttcctccatgagagagtccctccctgacttcttctagctttctcaaatggctgtggctctccaaactctgcctgtatagtcacaccgtctcctttcctgtgcatgtcaaatctccctctgcctctctttcacaagggtacaagagatctcacccaaataatgcaatacagtcctaccatgtcaagattcttagttagatctgcaaagacccttatttcttataaggtaatattttcaggttccagggattaggacttgatgtgttttggtggccattaaaaatagtgcccttgctctaatacaaagaatatgtaatttgcgaatgccaggcaccgttgagggcataggtaccataaatgactatatgaaaagaaacacaccaacttcttcctcacttagcttccataatgccaaaaaaagtggactcttaccttcccttaaatagatctaaaagctctactgtaaggaacttgattagtccaaaaagaaagttctaaagttagtgcccccaaaatgcccccaccaccagattattctgcagtgaagctcaaagtcaacaaatcagatccacatgatcacagtctccattcagtcttttattcttccactcttaatcacaggcatacagagattgccagatatctgagagaagcttcaaacatggaagatagactctaaaataaacaaacaaaaagcaaatacctctttgggggtagcaggctattcaaggaaagaagcttactttttatagtagtgatagcctctgaacaataaaaacagatggaaacatttagagacctgaaagaacaataaaaaaatttaagaattgaaagacttaaactaaaattatctacccattcagtccatcaacatataaatagagaaaataagccattttcagatttgcaaaataccaaatttttgattttctcgtaaccttcctcaaaaagttattgaggatgtttactctgaaccaaaatggagtaatagaaactagatttaatctcttccttgatacaaacaaaaaaagacaaaaataatgagaaagccatttgaaagacacaacatcaggcaacaaaggtaaatcctaatattaccccagtttaccaccttgagagtttacagatccaaaatgagtgatgaaaaactcagatggagcccagaggctccctgagttgaggacacagagatgagactccagagagatgaagaacgaagttagagtttctaggaaagagtaccagagaggagagagctcacaggacgaaacccagagaactgcagaatgtgccccacaagtagcgatcagtgctataagtgagaagactacccaaagtaggggggaaaacacccaaaagggcagtgttaacagcatctgcttctcacacagggatggtaagaggacctcatctcacccagcaatctgggaaacctctttgtttacaggcattggataggatacacagaaggatctcatctctggagtacttttccagccctcttaacacatccaagaagcaaaaactcaaaggatcaatctgctttcaagtaacttgactgcatgctcaaaaaaactcaagaatatttataggaaacaaaagtgcaccggacccaaaaaaggaaaatgcataatatccatcaaccaatcaaaaattgccagtcagacaaaaagcaggaaaatgtgattcattgtaaagcaatagagcaatcaatattaaactgacccagaactgaaaaagatgttagaattagcagacacatacatttaaaatgttattgttactatattccatatgtccagaaaattgagtagacacatggaagatatcttttttaactcaaatcaaacatctaaagatgaagatactggagaaaaaatgaacttgaagatataataatagaaactatccaaatatgaaacatagagaaaaaaagaaaatgaatttttaaaaaaccattggtagctgtgagacaacttcaagcagccgaacatatgtgtatttagagtcttccatggaaaagagaaagaggaggaaaaagaacaaatattttaataaataacctcaaaaactatccaaatttgatgaaaactataaatccacagtctaaaaagttcaatgaaccctgaacacaaaaaatgtgaggaaaactgcataagaatacatcataataaaattgctaaaagccggtgataaacagaaagtcttaaaagcagccaaagtaaaagcaaacactatgttcagatgaagagacatcaagataagagcatattttttgttggaaacaatgcaagtgaaaagacaggagagtaatatatttaaagtactaaaggaagagaaaactgtcaacttaaaaatctatacctgagagataatatctttgaaaatatcaatgaaaataaaagattattttcgaagtcaaaataaagattattttcagacatacaaaagccacaggaatttatctcaaacataccaacaaataattaagttgaacaaattcctaatatttgaaaacaaaaaaaatcactttctaaataattcataggcctaaaaaaattaaaagaacaaattcgagtgtattttaaacagaataaaaatgaaagtgtgttttaaaaagaataaaaatagaagtgcaattgttatgggttaaattgtgccctcaccccaaattatgttcttacccttagtacaccaaaatgtgactttatttgaaaataggatcattacaggtataatcacttaagttaagataaggtcatactggatagggaaggctcttaacccagtttggttggtgcctttgcaagaaaaggagaaaagacacacacagagagaataccaactgatgacagagacagaaattagaatgataaaccaccaagctaaggaataccaaggattgttaccaccaccagaaactaagaaaggacaaggaaagattctgcccagtgactgcaggagaacattttggtgacatttcgactctggacttctagcctccagaactgtgagagaataaattactgttgtgttaagtgatgcagcatgtggtactttgttacagaaaccctagaaactaatataacatatcaaaatgtatgggatgcccttaaaatagtacttaacatttaatttaacctacttaatatttatacttgaaaataaaagtgatcttgtcaatgacattagcttccaaagcaggaagaggagaaggaaaaaaataagtatctgtgcagaaatcaattatctagaaatcacgaaacaagtcaatgaaacccaaaacccaaaactcaaaacagcatggtactggtaccaaaacagatatatagaccaatggaacagaacagaggccccagaaataacaccacacatctacaaccatctgatgtttgacaaacctgataaatacaagcaatggggaaaggattccctatttaataaatggtgatgggaaaactggctagccatatgcagaaaactgaaactggatcccttccttaaaccttacacaaaaattaactcaagatggattaaagacttaaatgtaagacgtaaaaccataaaaaccttagaacaaaacctaggcaataccattcaagacataggcatgggcaaggacttcatgtctaaaacaccaaaagcaatggcaacaaaaaccaaaatagacaaatgggatctaattaaactgaagagcttctgcacagcaaaagaaactatcatcagagtgaacaggcaacctagagattgggagaaaacttttgcaatctatccacctaacaaaggctaatatccagaatctacaaagaacttaaacaaatttacaagaaaaaaacaaacaacttcatcaaaaaatgggtgaaggatatgagcagacacctctcaattgaagacatttatgcagccaacaaacttacgaaaaaatgctcatcatcactggtcattagagaaatgcaaatcaaaaccacaatgagataccgtctcacaccagttagaatggcaatcattaaaaagtcaggaaacaacagatactggagaggatgtggagaaataggaatgcttttacactgttggtaggagtgtaaattagttcaaccattgtggaagacagtgtggtgattcctcaaggacctagaataagaaataccatttgacccagcaatcccattactgggtatatacccaaaggattataaatcattctactgcaaggacagatgcacacgtatgattattgcagcactgttcacaatagcaaagtcttggaaccaacccaaatgcccatcaatgatagactggattaagaaaatgtggcacatatacatcatggaatactatgcagtcataaaaaaggatgagttcatgtcctttgcagggacatggatgaaactggaaaccatcattctcagcaaagtaacacaggaacagaaaaccaaacaccgcatgttctcactcataagtgacagctgaacaatgagaacacatggacacagggaggggagcatcacacgctggggcctgtcagagggtggggggctgggggagggatagcattaggagaaatagctaatgtaaatgacgagttgatgggtgcaagaaaccagcacggcacatgtatacctatgtaacaaacctgcatgttatgcatatgtacctcagaatttaaagtataatttaaaaaagaagaggaaagaaaatttacattctagccagactgatcagaaaaaaaaacaatgaaagagaagacacaagttaccaacataaaaaatgagagaggtagcaccactataaattctatgaatatttaaagaataataagaaaacattgtgaacatatttgtggcaacaaattgaccaatttagatgaaatgaaagattcaatattattgagatgtgtattctccccagtttatagattcaacacaatcccaatcaaaatcctagcaaggctgtagaaacttacaagctgattctaaaatttatatggaaatgcaaataatctaaaatactcaaaacaaccttgaataaaaagccaaaataggagaattgacactacacatgatatgaagattcatgataaagccatagtaatcaagatgatgctattggcatcacacaagataaacatgtagatcaatgaaacaaaaagtgctcagaaataagttcacacgtgtatggacaatgactttcaacaaagatgcaaaggcacaattaattggaaaaggacagtcttttcaaaaagagtactggaaaaatttaatttccatatggaataaacaaactttgatccatatctcacactgtataaaaaattaattcaaaatagattatgcatttaaatgtaaaatctataagaagtataaaaacttctagaatacagcataggagaaaatttaggtgactgagttaaacaaggttttattacttactatacaaaaagaacaatttataaaagaacatgtgttagtccattttcatgctgctgataaagacatacccaagactgggcaatttacaaaagaaagaggtttaattggactcacagttccacatggctggggaggcttcaaaatcatggtggaaggcaaggaggagcaaattatgtcttatgtggatggcggcaggcatagagagcgagcttgttcaggggaactcccatttttaaaaaacatcagatctcagagactcactcaccatcacaggaacaacacaggaaagagccgcccccatgattcaaccacctcccgccagtttcctcccatggcatgtgagaattgtggaagttacaattcaagatgagatctgggtggggacacagccaaactatatcataacacatttataatttttacttcatcaaaacttaaaacttctgcacttcaaaaggctttttaaaaattttttgagacgggactggagtgcagtggcacaatctcagctcactgcagcctccatcttctacaatcctcccaccttagcttcccaagtagctgggactacaggtgtgtaccactacatccagccaactttttcttttttttggtaaagatgaggtctcactatattgcccaggctgatccccaactcctggactcaagcagtcctccacctcagccttgcaaagtgctgggattacaagcatgtgccactgtgcctggccaaaagactattaaagattaaaaatactattaaaataattttaaaaagcagcttaactaatgaaataaaatatttacaaatcatgtatctgataggggaattttactcagaatatataaataactctaaatctcaataattaaaaaacataatccactaaaaatatgggcaaaatattttagtaaacatttaactaaagaaaatatacatgacaagagaatttttaaaaatcctcaataacattagtcactaagataatgcaatttaaaatcacaatgagattacaaatacaaacctattaaaatggccaaaatttgaacccctgaacataccaagtgttggaaaggatgtgaaggaattgaaactcttgtttgcagctggtgagactgcaaaatggtgggatgactctgtagagcattttggcagtttcttaaatagttaaaaatacacccaccatatgatccagctattctacgtctagatagttacccaagagaaattttaaaatattttcatacaaagatacatatgaatgtttacagcagctttacttgtaatagccaaaattgagaagcaaccaaaatatctactatcagttaagtggataaacaaactctgggatatctaactttaaaaatacaaaacaataaaaaggaatgttctattgatacatattacatgaacgaatctcaaaatatgctgagtaaaatcagccagatttttgtaaagtacatgctacataattctagtcacataaattctaggcagtgcaaagcaaatagcaacaaaaagaacagtagttgcctaggtgtggtgttaaaatgattgggacacaaaatgaggaaaatttgagcaccacaataattaatgatagtaatgtattataatacctttttaaatgcatgactatttaaaaaagaaaaagtgaccaaaaaattaagaaaaggagaaagaaagcctctactttggaaaagaatgtcaggtagcaaattaaaaataaatgagacaatcagaaaaataacattttgcaaactgcaatataatgactgaatcaggaaaagtcatcgatgaatgtaaaaaatgatttatacttctacatattttatattttcacacttgaaaaatgactaacctttgtaaatctaataagtttatatttgttgatatttcttacccatgtgtaggtcttctttgtttgaacaaacttaaacttgcacatttctcttgtaatacaaagcagttctgataaaggtatattaagctacaaacacatgacagaattttctagagaagactttctttgatacaaataattctggcaacagtaagcaggttatttataactcctgttctaatctagaaaataacttagatctctgtttcaaacacttttacatattgagatacacattcacaagagtcaataaagaaaaatgcttttatactatgttttctgagatttttgtgctaatgacaacaataagtataaaatcttcttcaatttctatatgtttgctgagattgaagcaaagaaattggttgtttatcttctattcttcttgctatctttgatagctggcatttctttctacagaaacaaaaataaagtagaaaaaaccctcaaatgtcattgacatgttttcagcagctaagtatgaaatttaaacatttcacctctggcaatttcagtattattttatatcaattatctagggaattacttctttatttagctctaggtataaaaaggagtaaaattcctccagtgattgaagctactgacagaattctgctaggaattttgaacatacatctcttcctctctcctttcagcagcaaagtacgtggggaaattatgtcaattatgaatttttctgttatacttaaaatacatcctaagttttaaaaaaattaaagcttgatgccgctggaaagtttattagttattattaagagcctgaaataaatgaagaggcaagtccaccaaaaacaaaaatccaaaacacagaaaaatagtataactcttaagaaaacaaagtagattttaattatttttattttttatttttaaaaggaatcaattaagaagagagaaggatttagattgtttttctttatttttccaatttttactaagaatatatttctcagttactgcttcctatgtctgcccaacaaagataattggaaatttcctgccaatttaatctaaggagattgtgtacttgttcaatgtacaccactctgtttccacaccaaatggtctcacatcaattgggcatattgcatttcagttacaacactaagttatcatcagactccacaggattaagggctgaattttgcacaggattgctctcactgtagatgccagctgctagactttggggatcctcaagtcacctgcacttctgaccaattggttattaattcaggaagtccccatgacatacataagaggactagacaaagatattgaaatggcaaggtctggcaggggatacagagcctctatgacatctcccatggagtcagggcacatcaccctcacagcacatctatttgccaaccaagcagctcccctgaacttcggcattcagagtttttattagagtttcatgtttttaagcgagactgattaaatcattggccatgtgattaaacataattttcaatccccctttcctctcttgaggtcaggctggcctttctgatggccagcccccatttcgaagctatctaggggcccatcatgtgttgcaccatatcagcataacaaagacattcttatacttcatgaaattgtaaggattttaggagctccatgccaagaactcaggacagagaccaaattctttataatactacatgttcttggtgcctttgattaactgtgtgaaacacaacctgttcccaccattgcctattgtctattatctaatcaataagatcaagcatatgactttactcatgcaggaaattctttcccaataagataaagttgcaactaatacacagttcaactagcttcctctcaaaataatagattgtttatcagtgtaaatgagtcttcctgtggacaatatacaactcaaaaggccaaattacttgtttatcaaatgactaattatcaagacttactttaaaaccctcaccttgatgtgtcaactaatcctaaactattacatcttgcacattgtccaattccaacaaccgccattattaaaagacacacctaaagccatatgccaaaggcttataattacatgtctttaatctccctctttccaagatacgataaaattctttcaagaagatggtctttcttactgcagaataataaactttgctaaatcaatttattatttcagtggtcttttcaaggagctggccatcaataatagccactgaaacttttctttctgtaaaactccaaaagggtagcccttctccccttgacctagctttctagaaaagattctgatatggaatattgctgatactcagactactgctatttctgtgatcaggaaactgtcctttctctctgacccaggagtctagtacctactgatgaaactgtaagactatttaagcttgcaggtaaggtaaaatcttagacccttcacagttcttgataatctattatattagaaaacaggaattaaaaatttctaggtaatttcatatgagtgattctactcttaggtgtctattttatatgaaaagacaaaatagaaaatggatttgacacaaatccattaagcttaacttttagtagcgttagatcttttaattttttttatcctatgattccatttatcttgagcttatcattcatttggtccttggcttttggtctttgtttaggggctgcagaggcttcactggttcatttctttccttggtgacattgtccaaagaccaggtggtagtcaggtttttaggtagattgctggactcagtattattctgcagcccataagaagaaatactgtttttatctcctaggtcactaaaggcatctaagtgtcttggttgattcttctgaactaagccacttagttcattgagtctctcctttctgcaggtaagatgtcaatatttaccctcctgattgtggctagtgaccacacagtattactcatgcatggtttctaggcatggcctttcagactggcaggtaacttcaagggacccatgactatggcttttgcttcgaacaaacatttttcttcattcattacatacatcccacagcccttgaacagtgtgattgggggtgggtcactcatgatttcattctgtctttctagaaaccactataacaacagatttggatttagagtaatcacttttaatgttatttttggaaaactttgtctttgtagccttcaaaaacaagatttggtgctttacattagactgttttgggatgctcctcacagagggtctttcttcaggacttccgttctgcactgttattatcagttctgccagctctgggctataatctattggtatctctggcagcttttcttcaataatttcataaactaaagaattggtatttttacattgaaagtatgctttgggtgaccatttcacaaacacagcatcccagagtccaaacatcagacttatagctctagtgtttgtttgagaataattgaggactcatgtagtaaggtgtgccagtgagggtactaaccatgtcacagttgctatagtgatccagggtggggcactgccctcagacacttgattttaagtagtccatagaatatcaaagaaagagttggtcaccaaatacagatttttaaaataaatgtaaaccattagcatatatagataaaatataaaaatgaatgcaaataatttggtttttctagaaagcatctagtattatgttattcaaaataatattgttcacagtatttattgtcttgatcgaaatgttagttttcttttgacttaattttagtttctgtttaattcctaggaaggctattggtttaaagaaaaagtcttaccactcaaaaatatgagttgataaagacagtaaaaaccatgtgttatcatctttgtgcagtttacaagacactgtgcccataataatacattctcaataaagaataaaggaaggaaaaatataagaaagggaagaagaaatggtgaaaaagaatcataaaaacaaagataaactcatgaatcaataaaagagagaagaaaagggaaaagtaaaagaagaaaaacataaagagggaggggaagatcatgaaagacaagaaaaaagacgaaagataatttttttctataacacaacagtaacatggcaaggaattctcaactctcaagatttactgaaattttgacagaactcagagagactgtagaatgtgtgcttgaaacgtgaatgaagaaaagagaaacaaatcagataatgggcataaggtagactcttatccgaatgtacaaaagtgagtgggtatatttttttaaaaataaagacagttttatggtatgaatgtgtctcccaaaattcatatgatagaacttaatcaccaatgtgattttaccaagatgtggagactttagggagttattaagtcatgaaagcagagtcatcatggatgagattagagccattaaaaaagggcttgaaggagtaggttctttctcttcccctcttctgcgatgtgaggacactgctttcaaggcagttccaagtttcatcttggaagcagaggctggagccctcaccagacactaacctgcagccactttgatcttggacttcactgtttccagaaccatgaggaaataaatttctttataaattacacagtctcaggtatttgttataacagtacagataaactaagaaagacaatgattttgcatctatatcttgaagaaaataaggaatagtatgtaaacaactgtttaaagtgtttaaaacagtctattccattgaaacactgttacacattagaatatatttttatattaattttttctcttttctaagaacaggatcctcactttgcatggcctaaaacctcaatttgcaggaagcagtgtggagagtggtagagcagcagtccccaacctttttggcacagagaccggtttcatggaagtcaatttttccatgaatggagggggtagacactcacatcatcagacattagttagattctcataaggagcaggcaacctagatccctcacatacacagttcacaatagggttcatgctcctataagaatctaatgccaccactgatctgacaggaggcagagttcaggcagcagtgctcactggcctgccactcacctcttgctgtgcagcccagttcctaacaggcccagggtttgggaacctctgtggtagtgtctgagaaagtagatttatgatgctgtagaagaaatgccaatataaaagctgagatgatacttaactcctaacaagtaaccagaattttgcagccaaaccattgccttataagtccttggtttctacatggccaaaaacagaatccaaaacttaggtagagtttagctggagggactcacacagagtgaccatatagctacagaagagctctgcagtgagagctgttgagtgcagagtcacagtcattactcagagcccatccttttatctcttcattcatttagtgactgtgcatgctctttgccacttgcttttacccaggcaacattgtatagtcttgaaaattcaccaactgtcatctcatatgtaagctcttttctgattcatcacactgatttagaagactcttgtctgtacttccacggcaccatgtgaaaaatatctattatattccatattataccatgttttaactcttcttttaaagctgtgcatcttcctcaatgactgtaaattttttaagagaacacaccatttataatttcatggcatatacatatatatatgtatatatatatgtatatatatctatgtatatatatatatatgtatatatatctccatgtatatctcattaaatgttgagtgaataaaatcaggctataattctggcaaagtatattaatgtttttaagacttcaacaatatggctttttaaacttaagctggtttgactgagttttttatatccttcagaagcttaaagtctcaccatctagagttaaaaggaaatgctttgtgatggaatctccatttttttcatgtaaattcaaccaaataattttaattttacacataagagatattttggtcttctaaaatgtatctttattattatggaagtgatttttttcctttactgattttctggttgggaaatatgggcattttcttttgttttgaacttacttccttttctttacgtggtggattcagcctaaacataaaataaaagttaagagagatagaatcaatcatcagggaataaaacagagaaagaaatcaacaaacatgtccttccttttttttctatgaatgatatagtgaacagaaatcaggacaataacaagcaaaatgacttaatgaatccaagtagttctcttatgttggcttagaattatagcatgttgaatccaatgagtgattaatattcaatacagttgtgaacgctccatgtatgaaaaattgtgtatggtataattcagaaataaaggccaaagctccactaagttaaaattggctagagttgcactagatttaaactattaaaaaattcacaaaacttaacccagttttatatatgacacccaaactttgcactggtcaaattttgtcttaaaaatgtgagggttggagctgtttcttacaacttaagctatatgtagacaaatagcttcatcagtccacataatattcccattgttttaatgttgtgggctacatctggagctatcagaataaatctgaatactgcttcaagctgggggtgtaagctaacaccacaaagaatctggctcactgtaggaaggccaggactcgcaaaaggccaggtgacagtgaagcaggcttgaaagcataagagtgtcatgttccttgttcatttcataccctactaatgtttccattcatgtgtgagccccagcagcagaaaatctagtagaacatagagatagagagtgccaacatttcatcaggtgagcagcagtcatattcagatacctttccagtataagcgggatcggccagcattctgtaaggagaggaggaaagaataggccctgatgcagagatcagaaagatctaagaagattcccagccaagaaatcaacagccacttagggcctttgctgaaaaggaggacaagggaattgctgaattgtccccaataggatgtttatgttagagattctgaaaaagagccaaggctgacttatggcaagaaagtcttcctactggactctagtgaataatgttgtgtatgtgagaactctgcagcaactgcatcacagaacggtatctccctctcccaattctgcttccttcaccagcctacagagctgtttctgaaaacactcctgtagactatcaagtcagtgtgtgagaagttctgttatagcacatttatgtattttcccttttcttcctttcttctttctaattagacaaacctacaaaggattcgaagtagctatggaacaccatataggaaattaaataccagcagttagaaaaatctttcttccttacttacaacaaaacaatgttaatgttagctacagttttattctaaagaaaaaaaaagaatgcaaattttatttatttttgatcattcaaaacatttaaatctataactggtatggtctctggaatctagacttagaatttaaattagcttaaaacattatttctgctaactctgcagtatcaacataattactaaggaaaatttaaattttctattacactgtaatttctcctccattctacagtgagataaactgcagcctcttaagctttcaaatacactaaactttctaaagtgaattttaaaaaggaaaaactggattattttagcaaatcaataattatttacaagtagattcatagatcagattagactagattcgactgatagatataacacattcataagaaaccaaaattgttggattcaaatagtaaaagtaactaagtagataaattcagacttccagatgaaatatgaattctttatgaaataataagatatcgctatttgtggcaataaaatttggatgctaatagcgcaaaggaagttttataaatgaaataagcatggtcaaaattagtctaacacctctgaccacaactcttgtttttgttgaaacacaatataattaagccaatactgacctggaaattttatagcttgccattcatcttctccaaaataaattgattaatgcctgaacatatggtgatacgacagaagaaagaaatctattatcactgtagttacaattcaggtttattattaaaactgtctgcattggaaaaatatgtatttttgggtaattgtttcatggattatatcaatgtaggtaaggtattaggtttttaaagatttcgcttaaaccttatgcgattcattattggcaatttaaattacctcgataatcagttttcaattactaaattaagatcattataacatagtccaaaaaatgacaatttagttttaataggaaagaaataaactgtcaactaggcatgtctggagatatgatcaattacgttaagtgatttgaccaatatggctgcatgggaagaacatttctgaccctttttggtcaggccaagtatttttttgtcaatagttgtcagtagttgatctaaacacttaagaaaagtgacattttactctgaagataatcagcaaaatacagaacaaattatggagataaatgtaagtatatgtgtgcaggaatacatcctgaatataccaaaacagggcacatatttgcctttttataactttttttaaaaaaaggaaagttggggattaagatggcagataggaggcaggactagcttgcagcttccgcttggacagacagagcagcatgtggagattcacatcatgaacttctccaaaaactacggcaggagcataaccaggaaagccaagagaatccacagaccctttgaaggaactgaatcaccaatgcaggctccctgagatgctgaaaaactgtgagtccacttgctttctcaatggggaggctcgtggtctggggcaagttcttagtcctggtctccggctgcctgaaaatcgattcggtgctgtttggggaacacagtgaaagtgagaccagtctttaggactgcaggctgtgtgagagcagggtgaggcctgtgactgccggcttttccccactttcctggcaacctgtataactcagcagaggcagccataatccctccaggaatataactccactggactgggaatcacactcccatcccccacagcagccacagcaagcctcacccaaggagaggctgagttcagacacccctaaccctgcccccacctggtggtctttctctacctaccctggtagccaaagacaaaggtcataatctttcggaagctctatagccctgtccactgcctgagagacctgaatacttaaccaggggtccctagagcaactttgcgtcctccctatagggaggcagttttgaaagtgccacctcctggctggaggccaaccaacacaacaccagtgcactaaacaaaaatacaaccaagggccctcacagaattcacttcactcccttgctacctccactggggaaggtgtggatatcatggctgcaagacctgaagatggatcacatcacaggactcttcacagacactccccagtaccagcccggagcctgggagctctgctgggtggctagacacagaatatcaaaaacagtcactaaagttaggctctcaggaagccccatgtctaggggaagggggataacactacatcaagagagcaccctgtgatagaaaagaacctgagcagcagcccttgaattccagatattccctctgacatagtctacccaagtgacaaggaaccagaaaaacaattttagtaatatgacaaaacaagatttgttaacacctgcaaaagatcatatcagctcaccagcaatgaacccaaaccaagatgaaatctctgaattgccagaaaaagaattcagaaggtcaattattaagctaatcaaggaggcaccagaaaaaggtgaaatccaacttaaagaaatcaaaaacatgatgcaggattagaaagcaaatttcttcagtgaaatagatagcataaataaaaaacaattacaacttctggaaatcaaggacacagagaaatacaaaatgcactggaaagtctcagcaatagaatcaaacaagcagaagaaagatcttcagagctcaaagaaaagtctttcaaattaacctaatccaacagagacaaagaaaaaagagtttttaaaaaaaatgaagaagaactccaagaagttcggaactatgtgaaacatccaaccctaagaataattggtgttcctagggaagaagagaatctaaaagtttgcaaaacatatttgagggaataatctaggaaatattccctgcccttgctagtgatctagacatccaataaaagtagctcaaagaacaccttggaaatttatcacaaaaagattgacacctaggcacatagtcatcaggttatctaaagtcaaaataaaggaaacaatcttaaaagcagtgaggcaaaaggatccagtaacctataaaggaaaacctaccagacaaacagcagatttctcagcagaaaccctataaactagaaaggattggggtcctatttttaggcaccttaaacaaaataattatcagccaagaaatttgtatccagagaaactaagctgcataaatgaaggaaaaatggtcttttccagacaaacaagtgcttagagaattcaccactaccaagctagcactacaaaaactgctaaaaggagctcaaaatcttgaaacaaatcctcaaaatacaccaaaatagaacttccttaaagcataaatctcagaggacctatataaaaacaatacaatgaaaaatggacttaaactacacccttcaacaagtggatttaacagatatttacagaacattctactcaacagctgcagaatatacgttctactcatcagcacatgaaacactttccaagatagaccatgtgataggccacaaaacaagtctcagtaaatttaagaaaattgaaattatatcaagtattctctcagaccacagtggaatataattggaaaccaactccaaagggaaccttcaaaaccatacaaatacatggaaattaaataacctgctcctgagtgatacttgggtcaacaatgaaatcaagacataaatttaaaaattctttgaactgaataataatagtgacacaacctatcaaaacctctgggatacagcaaaaatggtgctaagagaaaagttcatagcattaaatgcctacatcgaaacatctaaaagagcacacatagactatcaaaggtcaaacctcatggaactagagaaacaagaacaatccaaacctaaacccagcagaagaaaagaaataacaaagaccagtgcagagctaaatgaaattgaaaccaaaaaaatacaaaagatatatgaaacaaaaagctggttctttgaaaagaaaagcactattgatagaccattagcaagattaaccaagaaaagaagagagaagatccaaataagctcaattagaaacaaaaaaggagatattacaaatggtaacaaagtaatacaaaagattattcaaggctactatgaacacctttatgtgcacaaactagaaaacctagaggagatggataaattcctggaaacatacaaccctcctaaattaaaccagaaagatacagaatctctgaacagaccagtaaaaagcagtgagattgaaatggtaaccaaaaaaatgccaacaacaaaaaaaatagtaccagatggattcacagctgaattctatcaacattcaaagaagaattggtaccaatcctatggaaaccatttcaaaagataaagaaagagggaatcctccctaaatcattctatgaagccagtatcaccttaataccaaaaccagaaaagaacataacaaaaaaagaagactacagaccaatatccctgatgaatatagaggtaaaaatcctcaacaaaatactagtgaaacaaatccaacagcatatcaaaaagataattcaccatgatcaagtgggtttcaacagggatgcaaggatagtttaacatctgcaaggcaataaatgtgatacactacataaacagaattaaaaacaaaaattacataatcatctcaatagatgcaggaaagcatttgacaaaatccaacaccacttttgattaaagccctcagcaaaattggcatacatgggacacaccttaaggtaataaaagctagtaatatctatgacaaactcacagccaatgttatattgaatggggaaaagttgaaagcattttctgtgagaactggaacaagacaagggtgcccactttcaccacttctattaacatactattggaagtcctagccagaacaatcagacaaagagaaagaaataaagggcatccaaatcagtaaagatgaagtcaaactgttgctgtttgcagatgatatgatcatatacctagaaaaccctaaagactcatgcaaaaagctcctagtactgaataatgaattcagcaaagtttcaggatacaaaatcaaggtacacaaatcagtaggtctgctacaccaacagcgacaagatgagaatcaaatcaagaactcaacccctttcacaacagctgcaaaaaatatatatatatttaggaatatacctaaccaaggaggtgaaagaccactacaaggaaaactacaaaatactgctgaaagaaatcatagatgacataaacaaatggaaacatatcccatgctcatggatgggtagaatcaatattgtgaaaatgaccatactgccaaaatcaatctagaaattcagcgcaattcccatcaaaataccaccatcattcttcacagaactaggaaaaacaattctagaagtcatatggaaccaaaaaagagcccatatatccaaagcaagactaagcaaaaagaacaaatctgtaggcatcacattacctgacttcaggcaatactataagaccatagtcaccaaaatagcatggtactggtataaaaataggcacacagaccaacggaaaagaatagaaaacccagaaataaacccaaatacttagcgccaactgatcttcaacaaagcaaacaaaaacttaaagtggggaaaggacaacctattcaacaaatggtgttgggataatcggcaagccacatgtagaagattgaaactggatcctcatctctcaccttatacaaaaatcaattcaaaatggatcaaacacttaaatctaagacctgaaaccataaagattctagaagataacattggaagaacccctctatacattgtcttaggcaaagacttcatgacttagaatccaaaagcagatgcaacaaaaataaagataaataaataggacttaaactaaaaagcttctgcacagcaaaagaaataatcagcagagttaacagaaaacccacagagtgagagaaaaccttcgcaatctatacatccaacaaaggactaatatccggaatctacaaagaactgaaacaaatcagcaagataaaaagaagcaatcccatcaaaaagtgggctaaggacatgaatagacaattgtcaaaacaagatatacaaatggccaacaaacacatggaaaaatgctcaacatcactaatgatcagggagatgcaaatcaaaactgcagtgtaataccacctcactcctacaagaatggccataatcaaaatagatgctggcacagatatagctaaaacggaacacttttacattgttggtgggaatgtaaactagtacaaccactatgggaaacagtgtggaaattctttaaagaactaaaagtagatctactgtttgatccagcaattccactactaggtatctagccagaggaaaagaagtcattatacaaaaaaagatacttgcacacacatatttatagcagcacattttgaaatggcaaaaaatatgaaaatagcccaaatgcccatcaatcaatgagtagataaaaaaaattgtgtgtgtgtgtgtatatatatacatatatatataaagaaattgtgtgtgtatgtatatatatatatatacaccatggactactactaagccacaaaaaggaacaaaatagtggtattagcagcaacttggatggaattggagacttattctaagtgaacaaactcaggaatggaaaacctaacattgtattttctcactcatatgtggaagctaagctatgagtgcacaaagacatgagaataatagactggactttggagactcaggggtaagggtgggaatggcaaaagataaaagactgcatattgggtacagtgtacactgctcgggtgatgggtgcacccaaatctcagaaatcaccactaaagaacttatccatgtaaccaaacactacctattccccaaaaccctgttggaataaaaaataaataaataaaaagggaaaaattaatatgacttatagcacacaactgaagtaaaaatatgagttttatccttaagcacagaacagtaataggaaatttaggcctgtattgaatccatactggtgacttatttgttccgtattattaaacaagctgttaaactctctgaaaatccattattattttcctctgtacaataaaaaaaaattacctctaccttgaagagttgtgaaaatttggaagaatgtatacaaatgactagaggcactaccaggcacatagaatgcactctttatatttacttccttccctccctacttcccattctgttactagtacactatgaagtttttaaccaatcacttttggggtctcagttttacctctataaacaagcaaggccaagctattttgacaatttatagtcccaatgttatgacacattgttaggtcatgagtaagtgggcaatgtgtcacaagtagtccaacctaatattaataataattaaattaccaaaatttacaaataagtttcttttaaaatgtacaattataacatcaaaataagtcattagtacttccacttgcttttgagatggagcatatgaagtagtttcggatgataaagatggaattgctctaatgcataggctactttgtctcacataatagcattgatgtacccttaatagttggatgattataagttacagctctcatatattatacttttcttaactgaatatttcttacttattttatttatgtatatgtttctaaaaggaaaaagataacaccaattttttttaagtctgtagttctatacactttacttccctgcaaaaccctttgtcatttctcaaatcagagtgtgctgatgagagtgtctgaagcaaaccatgatcatccttagcgcttgtctcagtgaagacaatgttggaaaccactgaatttcatcactaaggattttttcttttagtgttggtatcgtttgatgtctttctatttatttttattttttattttagatatagggagtgcacagtcttgtttgttacatgtattacatgtgtaatggtggggattgggtttctagtctacctataatccaaatattgaacatcattatacctaataggtaattttcaaccctcactcctccctaccttccccgctttcagagttttcagtgtctattatctccacctttacatttatgtgtactcactgtttagctcccacttgtaagtgagaacatgtgatatttgatcttgtgcttctaagttagtctcaggatctttttatctgcaaaccatctatgttatcccccaacaagtctagacatgcaaacatgtttgcaagtaaatgctctttgataaaagaaaccctttaagaaattcttgggaaaactttgtaataactgtaaacatttcaaagtattatgccataattttggtgtattataggagcaatagaaaaaaaaggattctttagttaaaatggcaaaacccactttagaaagaacatgtctaaaacatgatgtaactcagaaaaagaattattggatcttaaacaaagaaaaggattatcaaagcatttgactagattgtacagtacctctgattatctgccgattcacaaccctttaatatcttatatttattccaatatggaaaatatagtgcacctggtaaaattaggcaatatttaaattccatgctcaacctatttaaaatatcaactcaaaaatattatagcacatatcttggaaggcaaaatatgactattttatcttttgggaatatacactgtatcagctgcctaggtttgcaaaacaaattatgacaatgaacaatgaatcaaaacaatgaatatcacaatgaatcaaagaaatgaaaatggaaatatgatatacaaacacctatgaggtacagcaaaagcagtatgatttggaaagtatattgcatacacatctacacctaaaaagtagaaaaacttgaaataaacaaccaaatgatgcatcttaaagaactaggaaaggaaaagcaaaccaaacctaaaatgagtagaagaaaaaaaaataaagatcagagcagaaataatattgaaatggagaaaacaatataaaatgttaacaaaacaaaaagttgatttttttaagagataaacaaaattgatatacctttagccagacttattaaggaaaaaaagaccaaaataaataaaatcagagattaaaagggacacattacaatggataccatggaaattcaaaggatcactagaggctataatgagcaactatatatatatatatatatatatatatatatatatatatatatatatatatatatatatatgagtattttgtcttttgggaatatacactgtatcagttccctagggttgcaaaacaaattatcacaatgaacagtgaatcaaaaagatgaatatcacaatgaatcaaacaagtgaaaatatatatatatatatcaatacattgaaaagcctagaaaaagcagataaatttctagccacatttaacctaccaagactgaaccattaagaaatctaaaacctgaaaagaacaataacaagtaatgagatcaaagccacaataagacttccagtaaagaaaagcccaggaattgatgacttcactgctgaattttaccaaacatttaaggaaaagcaaatgccgatcctacacaaactgttccaaaaaatagaggagcatggatacctccaaactcattctgcaatgccagcattaccctgataccaaaaccaaagactcatcaagaaaagaaaactatacatcaatatcactgatgaacataggcgcaaaaatcctcaacagcatactagcaaaccaagttctgcaacatgtttaaaagattatttattatgaccaagggggatttattccaaggatgcaaggatgattcaacacacccaagtcaattagtataatacataatatcaacggactaaaggacaaaaaccatgtaatcctttcaattgatgcataaaaacatttgacaaaactcaacatctcttcgtgattaaaacaattaaaaaactggatacagaagaaacataactcaaaaaaaataaaagccatatacaacagacccacagctagtatcatactgaatgaggaaaaactgatggcttttcatctaagatctggaacaagacaagaatgcctacgttcaccactattattcaacataatattggaagtcctagctagagcaatcagacaagagaaaaaaataaagggcacccaactgggaaagaagaagtcagattatctttgtttgcagatgttatgaccttatatttggaaaaacctaaggactccagaaaaaatatattagaatcaataaattcagtaatatttcaggttacaaaattaacatacaaaaaatcagtagcatttccatatgctagcagtgaacaatctgaaaaggatatcaagaaagtaatccaattataatagctataagtaaaattaaatacctactaataaacttaagcgaaaaaagtaaaagttctctacaatgaaaactataaaacattgattaaagaaattgaagaggacacaaaataatagaaagatattgcacgttcatgaattagaagactcaatattgttaaaatgttcatactatccaaagcaatctacagattcaatgcaatccctcaaaataccagtaacatccttcacagcaatagagaagaaaaaaattccaaaatttatatggaaccacgaaaatcaagaacagccaaagctatcctaagcaaaaagaacaaaactggaggaatcacatcacctgacttcaaattacaccacagagctatagtaaccaaaacagtatggtactggcattaaagcagacacatagaccaatggaaaagaatagagaacccagaaatgaatttatatatctacagtggactcattttcaacaaaggtgtcaagaacatactttggggaatgacagtctcttcaatcaatgctgctgggaaaactggatatccatatacagcacaatgaatctcgacccctatctctcatcatacacaaaaatcaaataaaaatgggttaaaaatttaaatctaaagaaactagtaaaagacttcaatcttatacttgcaaactgctataagaagcatgaggaaaactcttcaggacattggtctgagcaaagttttcttgagtaataccatacaagcacaggaaaccaaagcaaaaatgaacgaatgggattacatcaagttggaaaagcttctgaacagctacagaaacaatcaacaaagtgagaagacactccacagaatgggagaaaatatttgtaaactacccatctgacaagggattcataaccagaatatataaggagctcaaacgactcaatagtaaaaaacctaatacgctgatttttaaattggcaaaagatctgaatagacatgtttcaaaagataacacacaaatggcaaacaggtatatgaaaaggtgttcagcatcattgatcatcagataaaaggaaatcaaagctataatgagatatcttctcactccagttaaaatggctctcatccagaaccaccactcaatccagcaatctcattgctggatatatagaggaaaataaatctttctaccataaagacatatgcacacaaatgtccattgcagcactattcacaatagcaaagacatggaatcaacatgaatgcccatcaatgacagattggataaggaaaatgtggtacatatacaccatggaatactatgcagccataaaaaaatgagatgatgtcatttgtgtgaacatggaaaaagctggacgttattattattagaaaactaacacaggaacagaaaactgaatgccacatgttctcacttataagtggaagctaaatgataagaacttatgaatacaaaggaaaaacaacagacactggggcctacttgagggggagagggaaaggaaagagaggagcaaaaaagataactattaggtacttggcttaatacttgggtaatgaaataatatgtacagcaaacctctgtgacatgtgtttacctatataaaaaaccttcacgtgtacccccaaacctaaaaaaaaaggtaaataaatatacaaataaataaaattacttttatcaaaatacaggcaacgacaaatgctggcaaggatgtgaaggaaagggaaccctcatacactgttgatgggaatgtaaattaataatacaacccactataaaggatggtttaaagtttcctcaaaaaactaaaaatacaactactatctgatccaacaatcccatttctaggtatctacccaaaagaaagaaaattagtatattgaaaagatatctccactcccatgtttattgtagcactattcacaatagccaaggtttgaagcaacctaagtgtccatcaacagatgaatagataaagaaaatgtgatacatatacatgatgaagtactattcagccataaaaaataatgaactcctgtcattttcactaacatggatggaactagaggtcattatgttaagtgaaataagccaggcacataaagacaaactttgcatgttctcacttattaatgtgagttaaaaattaagacgatggaactcatgaagatagagagtagaaatatggttaccagaggttaggaagggcaggaggggagtggggcaaaagtggggatggttaataggtatgaaaatatagttagatacactgaataatatctagtatttgatagcacaacagggtgactacagtcatcaataacttattgtacatttcaaaataactaaaagagtataattggattgtttgttacataaggaaaggataaatgcttccagtgatttataccccatttaccctcatgtgattattatgtacaacatgcctgtatcaaaatatctcatgtaccccataaatatatgtacctactatgtacccacaaaaaatattttaaaataatagaaaattttaaaattagctgcttaaagcaccagaaattaatcatctcacagttctataaatcagaaatgatagttttggcaaagttagttacttctggaggctctgaaggaaaatctgtttcatgtctctctcctagcttctggtgactatcaaagtaattggccatttcttgacctgtagacacattatttcaattgctgcctgtatctttacatggcctttccctctgtgggttctcttttgtatctgtgtgtctcaaacctgccttccttttccctcttataagggcaccagtaactgaatttaaggcctaatccagaatgatctcatcctaaggtccttagttatgtctgcaaaaaccctatttccaaataagttcacattcacaaatactagagattaggtatcatgcatatctttttgaggaacaccattcaaccactgtagcctgccctcagccccctaaaatttacatctgtcctaaatggaaaatggggaatcacaccattccagcatcactcaaagttttccaattacagcatcaactctaaatccaaaatcttatctaaaagtcatctgctcaaaaagtcccaaatctaatattttaattatctaaatcaggtattggcaagactctccatatgatccatcttgggggaaaattcctcaccatctgtggacctataaaactataaaacgagttgtctgcttccaaaatacaaaggtgggataagcatagaaaaaacattctcattccaaaggagaaaactggaagaaataaaggggtcgctggtctccagtaagtttgaagccctacaggaaaaattctgttaggtttcaaaacctgagaaaattctccatagctcaaagctctgtccactgggcccatgaaggctctcctctccggacttaaacagaacccatcctctgctcccaggaaggctcgttggccactgcctctgcattcaaaatactgccctcagaattattactcttttttattgtaaaggggcacatatttgcaggcaaattactctattatcctttttctgcttgtagaattttgggagttcagaaacattcttttattttatccaattcctttcagccaaaactgttagaatttctcttggtataacattctcaaaaatgttgtgagtctcctttgtaattcatagggttccacatgattagacaagaggatactcaacagatccttccttgaacacttcatctctattgctggattctcctgagacattttattggctccataagtcacacccaatctcttcaggaaaaggttgtccagccacacatttggccctgtccccagagaatgcttttctagcagcaaattttctaactttggcatcctttacaatgtgaatagaccaagaactgtccaaattatcaagtgctcattgcttttttgcatgagttccttcttccatttatctttttcctctggaattgtactataagctgcaacttcaacactttgcttggaaatttcctcagctaaatatccaagtttattgcttacaagttcccctctctcccaacagtagaccacaattcaaacaagttttctgccattttgtaataagaatcacctttcttccagtttccaataaaatgctcctcatttcttcctgagatctcactagaaatacctttaatattcacatttctatcaaccatgtcttcaaggcaatttaggctttttctattatacacctaaaaattctttcagccacttgcacatttttaggtatttcttacagcagatcccactctcagtaccaaatctgtatcagtcaggattccatcagaaaaacagaaccagtgggatgttcacggtatgtgacacatccccattatgaagggtaatcttctttatgtaaagtcagttgtcttctgccaggcagtgttgctcatgcctgtaaccccagcactttgggaggctgaggcaagaggatttcttgaggctaggagttagagaccagcctgggcaacatagtgagccccttctcaaaaaaaaaaaaaaaagaattgattagttgagtgtggtagtatgcccctgtagtcccagctacttgggaggctgaggtgaaaagatggcttgagctcaagagttcaaggctgcagtgagctatgattgcaccactgcactccagcctgggcaacacactgatatcctgtttagtgtgagatcctctaaacgaacaaacaaacaaaacacagagtttattgcctcatagaagcagagagtagaatagtggttaccacaggctgaggtgaaagagaaattggggtgatgttggtcaaggatacaatattttagttaggaggaataagttcaagagatctattgtactgtacaacctggtgactatagctaataataatgcattgtatacttaaaaattgttaaaagagtatattttaagtgtgctcatcacaagtaaatgatatgttcatgaagcaatgtatatgttaattatcttgatttagccattctacaatgtatacacatttcaaaacatcatattgtgcaccataagtatgtacaattttttgagtcaaatgggcaaataagtaagttttttttaatgtccacataaagatgggccatatgaaaatagtttgttatataatagatgctccccaaagttccagatctccagaaaagaaataaatggcatattgcatgagactaataaaatttaaaacggtccaaagaaagatggcaatttaatagatagaaaccataacaacaggcactgagctagacacttccttaatactaatacacaagataagaattatttccattttataaatggggaagtcatggttcagctgtatgaagtcaatcgctactaataaaagtcaacatttaaatatgtgctacttgaaatctaccctatatcaaagtccatgcattctccactgctcccagtggcctcttttagaaatgctcataatgtttatgagaatggacagatagtgcacgcaaaaggaaatctcttccttgcacccagctcaaccacaacaccaaattgactttgtcatagtctagctaacttttttttttacaaaataataaccccatagaacacacagacaaaaacatacacaccattcaaaaagtttatacaataaaaagtaagttttattgccaacccagatacctaatctcattcttcacaggtaagcttcatcaatatttcttacatatctttttaaaaaattcccaggcccatctattcttctacatctttttaaagacaaaaaggagtaatatatttgacactttgttctgtaccttgcttttgtttccttttttctttcttttttcttgtaaattaggtattttctcctcagcacatagaggattacaccatttattttaatgggtagtttattttatgtctatacaataatacatttaaccagttctctgtcagtgtgcttttagggttttcttgctttttgatgttccaacaaagctgaactcaactttttcacacatgtgggtgttgttttcttttgctctccttcttattcagcccagctgttcatctctgagagtcacatggcccttggtgtttgctatctactgttcttgtgcagtgccgaaactcccttgcaaaagaaaaatctctagggagattcttgcatttgttctctacagagctttaagagcaatacgggtaagcaagtgtcacaatttagatgttattgaaaacagatcttcataggttaacttctaaccttaaatattatacaacgttgtaataagaaacatggcaaggaaatttaaaaatgcttgccaaagttaaaagaaaccaatcacatttttattatacttcctaaaaattcatttagctctatttggaaacccctaccagtctgaagagtcatacattatttccttgcccttatgcactttttcacttgacaggcagaaacctagttttcattttattaaatgaaaatgaatactcagcaatacctatcgtttttatttatatttttagaataccaaacatcaaataacaacttctgatgacactgaggcatgattaatcattattataactctattgtgtcatctctgcaaatacttttcatttgtctttatttgtagcagatgaggactgctcctttttttttttttttttttttttacagagtctcacactgtctcccaggctggagtgcaatggcagtgatctcggctcactgcaacctctgcctcccgggttcaagcaattctcctgcctcagcctcctgagtagctgggattacaggcacctgccactacacctggctaatttttttgtatttttggtagagagagggtttcactatgttggccaggctgatctcgaactcctgaccttgtgatccactcacctcagcatcctgaagtgctgggattacagccatgagccaccacacccggcctgatgaggactgttttcatttcaaaaacaactattcaattcaacttcttcaataaaaagtgaatttagtaatggaatgagctggtaaaatgcttaacaactttttgctaatagtacaataaaaagaatttttaaatgaactattatttgagccagaatagcccaaatatcccctaaatgaccataacttttcacttttttatattgatttgttataggacagatcagcaccttataaaatgctgtcccacagaacgatgctccatgattgttaatagttataagaacaaaagggtgggaaagggaacatttaatgtataaatgttcattaagaaacttcgaaacaatgtacaggatgaatcttttcactttttttccctttgtcctactagtcagcattctctggtattctagaaatcaccagaaagaccagcatgcaaacttaatcatgaatagctatgaaacaatgattctcctttttaaaatccttagaataatgcaacttagaatgaattatcttcagcattatgaggaacattgttttttaaacgttatcaaccttaatggatgtaacaagtagaaatgtttctatacatataagtctcttgttaaaattctctttttaaaaaaatcactgtgtgacctaattttcaaaatatctgctttctgtctacctttcccaacctactatttcccattcagcaaaaccataaatttcctttttgagatttaagcaagaggttaactcttttgttaagcactgagccctcatgtgtcacccatcccctcttctgtgttcccaggccctctagaaacctaccacttattttcttttatcacatagtactataatttggcatgtatttttctgccggttttactaggcccaaagaacctaaggatcagagacaaattattagtatcagtattagtgttagtgctagcattagtatcagtatttacaggcatggtacctacacgggaacctggaactctccaagcattcaataaatgtgtgttaaataaataaatgagcaaaagtgtctccagagcctccatgttatcaatgtttttgtcaataatttaaatcaggaagagaatcaggtctgtagaaaatgtttaaattgatttttgccagagaagtgttttaagttaaattgtaataccttcagttgaagcatgcattcctctttctacagtcctgacatcactctattttcttctatctggcagtttcaaactctactcttacctagactctcacagcaactgagttttctacttctggtctagatattacatgagaaaaaatatccattacgtttacaggtataaaatgggttgtacatagagaaaagatatattttaataaaaatgaaaatagatatgtacacttaagtgggaaaagaagtgagaaaaatagataagaaataatacagtgtgatcaatttgtaaagtaagttctataacatgatagtgacatggtagccattagagcatatactcactccacatctttaatgagcatttaggcaacaagcagaggctgacatggaaaatggggaaagggttcccaggatggccaccaagatgattcaaggttaaaaaagaaaacctggtccaaataggaagagaggaagtcaaattgtctctgtttgcaggtgacatgattgtatgtttagaaaaccccatcatcccagcctaaaatctccttaagctgataagcaacttcagcaaagtctcaggatacaaaatcaatgtccaaaaatcacaagcattcctatacaccaataatagacaaacagagaaccaaatcatgagtgaactcccattcacaattgctactaagagaataaaatacctagggataaaatttacaagggatgtgaaggacctcttcaaggagaactacaaaccactgctcaagaaaataagagaggacacaaacaaatggaaaaacattctatgctcacagataggaagaagcaatatcatgaaaatggtcatactgcccaaagtaatttatagatcaatgctatccctgtaatcccagcactttgggaggctgaggcaggtggatcacctgaggtcaggagttcgagaccagcctgaccaacatggtgaaaccccatctctactaaaaaattacaaaaattatctgggtatggtggtatgcacctataatccgagctacttgggatgctgaggcaggaggatggcttgagccctggaggcagagattgcagtgagccgagatcacaccattgcactccagcctgtgcaactagagcaaaactcttctcaaaaaaaaaaaaaaaaaaaaaaaagatgtcaatggaggtaggtcagatactctagcaaaaacataaataaatataagaggcataaaagaatatagtacgtttaggaaatggtgataagtttgaatcattaaaggaaagtatgttggtccaggctctgtggctcatgcctgtaatccaagcactttgggaggctaaggtgggcagatcacttgaggtcaggagttcaagatcagcctggcaaacacgatgaaaccctgtctctactaaaaaaaaataaaattagccaagcatgctggcggtcacctgtaatcccagctactcaggagtctgaggcagggaaagttgcttgaacatgggaggcagatgttgcaatgagccaagaccaggccactgtactccagcctgggccacagagcaagattgtgtctcaaaaaataaaaaaaaaaaaagaaagaaaagaaaagtatgttggtgagtatatctggagagatttgtcaaaaacaatggaactaataaagtacaaatggaaccaataaaataaactattcctagactgtggtaagtttcacatgctctgagaaggcatatagatatagactttatattatcatcaaaaggtaactaacatgaggagttaatcaaagagtaatatggttatgttttgctttttttctttcagtaacataactttaatagcagtaaggagttatggattagagacagaaaaagagtagatatgtgtatatccattaggaaaactttgcttaagccgagaagggaatgaagagatgataataaagtcaacatttgaacttagcaattggttctttgcaatacactgtggagattaacaattcaggctttaaactagacttctagggtctacagctacttctgctattataaaaccacgaagaaactaactcctctaaacttcagttatgtgtcagttaaatagtacttcctggataagattatgcttgacataatgcatgtaaaagtactcagcgccatttgtggtacacagtaagaattcactgttaagtatcattactagctatggtgaggagataaaagtagagaaagagaaatccagaatgattctccgatttcctgcttgaataatgaagtactaggtaatgttggaagaaaaataggttttgcaaaaaggtaggtctctctctctctctttctcttttagaattattatctgcctcttttttcaatcctagtattctccttaacctagaccaggaagctgaacctgctggatatcttccattttcccttcagatcaattttctgcatctatgaagtaagaaacccagcttctgccaagaaatcctgctgcttctagcctgagtcttacactgcctgtggcttcttagtgccttaaaaaacaatccctccattaaactctactgaaattgtccaattggattgtgccatctctggttctgcaaagacccttactgatacatggaaactggcatatcctggaatcaagtctcctggagggattgggagtgacaagtatatctcaatacatcagaactgattatttcctactctatggtgacctactctaaggagattcgaggcaattttaaaaatccaataaaaggggggttagaatatcaatcatagcatggaggttataaagtagcaattactgaggaagcttaccagacaggaggtcctgagggcagccatgcgagaggagtataattctgctgggcaggtgtaggaaggatggactgtagaaaagaccaggaattctgcaggtccagtcacataattaaaggcactggtggggaaagaaatcatcaagatacatgcaaagtttgtgaaggagtataaaaacacagttagataaaaagaatagagaagttctagtattcataagtagaatataaaaattatagttaacaatgacttattgtagattttaaagtagctaggaaagaaaaattgcaatgttcctaacacaaaggaaagataaatgtctaaggtggtggatatcccaattaccctgatttgatcattacacattgtatacatgtatcaaaataccatatgtaccccaaaaatatgtccagctattatatatcaataaaagtaaacaaaataagaattttaacaaagtcaatgcagcacaacacaacaaaaatctggtgggacaactcacaccccagtggagatcaactcaggatactgatagaccatgtggattgagctaccctgcaaaaggcagaggctagttccaaagactagccgaggtgtctggaggttagtaacagtgatggaaaaagagctctggcccacatgcccctcccctagtgtcatcaggacaattaaagcttctttttgcactcaaatactgtattagaaggaagaggagaaaagaacctttgagagtggaaggaaattttgggagactgagtagttaccagaaaaaaaaaaaataagactaatatgcagaacagactgatacatgcttaattggcaagatctcatgctatctgccctcgataagactgtgtgcctgagaacaaaatgagatgttatagaacacaaacatctcgtttataatttaccttacatttctgtttctcaattaatgatgattcaaactgaacttcactgtatatatatagtcatgcaatttgggctaaaatgtgagaagccaataggacatccatggaaagatggcccagtatgtctaaagacatagatttggaagttattggcatataggtcatgttggagtcatgtaagtgaatgaattatcaagggcagaaagaagagagaggaaaaaaggtagaactcctgagtaacaccaatagttatgggatgtagacagagaaattactagaaggaataaacagagaggttggaaggtaatctagacaccgtggtgcatgcagaaaacctaagaggagagaaaataattctaaagcgggaataatcaatactgccaaattctgcagaaggggaaaaataaggataaggacagaaaagtggccaatagagtctgtatcataaatccagagagagaagagaaaaaaaactaagactacaggtctattgtgccatcaatgacttgagatattgccttaatactggctaacagagatattgtgtctaactgaacatcctaggaagttaatacagaggttacttcttcttatgcatatttgaataatattaaatatattcatatagctattaaaaagtataagacagctatatagtaaatttacactagtattttatgagcaggaggatatccaactgggtttcatttattcactttcatcaaaaagctacaaataagacactgtccatttgtgttacaattctttgtatgcctgttggtccattctctgtactagttatttgcaattaaatgagtcaagaagagagaatggaagaaactgatgagaaaaagtacactttggtaccaaagtgtaccaaatatttatattaaataattttctgttggtaacattcaaatttctcactgtcagcaaaacttcagcagaaatttcagatcatgatggttgatgtgacttggtgcccaaaagtaactgtgcttaagttacataaataactaaagcctgtcacagatgtttttatctactagcccatgatctattttatctttgaacttaaggagtccaaaaagatttgtccagagacatgttgtgtttataggtgcagtctagtgggcatgctgagtatctatttttctaaacacactatgttgcatcctgattaagtcatttatatgcaaatgttacactgaatgagatacctggtttttaaggcttctccattgtgcataacgcctccatcataaacgttgctcacatgtttagatatttattcctcactgagatatttttatcatcgattgacagaaatataccagtgattgctcagtactatatactatgccaattttcaaatagtctaatgggatagagccttcatgtcattaaagcacaagtttacagaaacataactgccccgggattagaagataattttagtagtctttgggaatttcatccttaacatttaggttggggaaagggattccagacacaaagtctgtcccctaccttgagaacaaagcctgagagtgttatcctgtgcactctaacgttttgcacaaaaatgtgttacattgaagcagatcactccaagcctgggatctaatggagtgggtctgaggtatgccacccacaagtacctttcttgaccaatgcatcagcttttgggagtattggctgctaatagctcacagctaagtgtttctcctggcatgtggaaaccatctaacccaaagttatgctccgccctaggggcagtttacatccagtggctggttaactggcaaggtggaaagatgagagtaagaaaaccaatcctttatgttttaatttgggacaaatctgaagatccataaactccagagcttctttgttgcaatcacaaggcattttcaacctctccctctgcctcatcctgcttctttcaatcctttctaatctaatttctgagagcattcacccataaaatttctgcaagcaaatctccacctcaaattctgtttccaggaatggtgacctaaagcagttgaagccaggagtggtcctaagaagcagtatataaaatggtattttagagctgagtcatctgctgatggctagcagtgaggaccccatcactggtgataggtagagcattattagctccaggcatattagaacaatgaaattgttaagactttcacctgagatgaatgggatcggaaaagaaagcattgtctggggacagaatctcaagcatttgagaaatttggggaaaataataattataaaaactatggaagaaatgactgttgctgagggctgtcatttcactggagaaagacaatggaaaactggagataattaattaccaatttaaagtaagtgtgaaaaccacagggattgtttggcagcatatgaagaatctctgccccagggtggttggcaagatggccaaatagaaacagctccggtctgcagctcccagtgagatcaacgcagaaggcaggtgacttctgcatttccaactgaggtactcggctcatctcaccgggagtgattagacagtaggtgcagcccacagagggcaagacaaagcagggtggggtgtcgcctcacctgggaagcacaaggggtcaaagagctcctttccctagccaagggaagcaatgagagactgtgccataaggaacaacgaattctggcccagaaactatgctttccccacagtcttcacaacctgcagaccaagagattccctcaagtggctacaccatcagggccctaggtttcaagcacaaaactgggtggccatttaggcaggcactgagctagctgcaggagtttttttcataccccagtggcacctggaatgccagtgagacagaaccattcattcccctggaaagagggctgaagccaggaagccaagtggtctagctcagtggatcccacccccatggagcccagcaagctaagatccactggcttgaaatgcttgctgccagcacaacagtttgaagtcaacctgggatgctcgagcttggtggggtaggggtgtccagcattactgagactcgagaaagctgttttccccttacagtgtaaacaaagctgccaggaagttcagactgggcagagcccatcacagcttggcaaagctgctatagccagccttcctctctagatttctcctctctgggcaaggcatctctgaaagaaaggcaccagcccctgttaggggcttatagataaaactcccatctccttgggacagagcacctgggggaaaagagggctgtggacacaggtttagcagacttaaacattcctgcctgccagctctgaagagagtggcagatctcctagcatagcgctcgagctctgctaagggacagactgcctcctcaagtgggtctctgacccccatgtctcctgactgggagacacctcctagcaggggtcgacagacatgtcatagaggagagctccggctggcatctggtgggtgcccctctgggaagaagcttccagaggcagcaaaaggcagcaatcttagctgctctgcagcctccactggtgatacccaggcaaacagcgtctggagtggacctccaggaaacagggtctggagtggacctccagcaaactccagcagacctgcagcagaggcacctgttagaaggaaaactaataaacatcaatatcaacaaaaaggatgtccaaacataaatcccatccgaaggtcaccaacatcaaagaccaaaggtagataaatccacgaagatgaggaaaaaccagtgaaaaaggctgaaaattccaaaaaccaggcctcttttcctccaaagcatcacaactcctcaccagcaagggaacaaaactggacaaagaataagtttgatgaattgacagaagtagccttcagaaggtaggtaataacaaacacctccaagctaaaaaaaaaaaaaaaaaaaaaaaaacatgctctaacccaatgcaaggaagctaagaaccttaaaaaaagaggttagagaaataactaactagaataacaagtttagaaaagaacataaatgacctgatggagcagaaaaacacagcacaagaacttcatgaatcatacacaactatcaatagctgaatcaatcaagtggaagaaaggatatcagagaaattaaagatcatatataaagtgtgaagacaaaattagagaaaaaagaattaaaaggaacaaataaagcctccaagaaatatgggactatgtgaagagaccaaacctgcatttgattggtgtacctgaaagcgatagggagaatggaaccaagttggaaaacactcttcaggatattatccaggagaacttccccagactagcaagacaggccaacattcaaattcaggaaatacagagaacaccacaaagatactccttgagaaaagcaacccaagacacaaaattgtcagattcaccaagattgaaatgaaggaaaaaatattaagggcagccagagagaaaggtcaggttacccacaaagtgaagcccatcagactaacagcagatctctctgcagaaaccttacaagccagaagagagtgagggccaatattcaacattctttaagaaaagatttttcaacccagaatttcatatgcagccaaactaagcttcataggcgaagaagaaataaaatcctttacagacaagcaaatgctgaatgattttgtcaccaccaggtctgccttacaggagctcctgaaggaagcactaaatatggaaaggaaaagccagtacctgcccctgcaaaaacataccaaattgtaaagaccattgacactatgaaaaaaactgcatcaaacaacaggcaaaatagccagctaacataatgacaggatcaaattcacacataacaatattaaccttaaatgtaaatgggctaaatgccacagttaaaagacacagactggcaaattggataaagagtcaagacccattggtgtgctgtatttaggagactcatctcatgtgcaaagacacacataggttcaatataagagataaaggaagatttaccaagcaaatggaaagcaaaaaaagcacgggttgcaatcctagtctcttataaaagactttaaaccaacaaagatcaaaaaagataaaaggaatcaatgcaacaagaagagctaactatcctaaatatatacgcacccaatacaggagcacccagattcataaagcaagttcttagagacctacaaagagacttagactgccacacaataatagttggagacttcaacaccccactgtcagtattagacagatcaatgagatagagaattaacaaggatattcaagacttgaactcagctctggaccaagtgggcccgatagacatctacagaactctccacccgaaatcaacagaatatacaatcctctcagcatcacatcacacttattctaaaattgaccacataaatggaagtaaaacattcctcagccaatgcaaaataatggaaaacataacagtctctcagaccacagttcaatcaaattagaactcaggattaagaaactcactcaaaacctcaaaacaacatggaaactgagcaacctgcccctgaatgactactgggttaataacaaaattaaggcagaaataaataagtactttgaaaccaatgagaacataggcaaaacataccagaatctctgggacacagctaaaggagtgtttagagggaaattcataacactagatacccacaggagaaagtgggaaagatctaaaatcaacaccctaacatcacaattaaaagaactagtgaagcaagagaaaacaaattcaaacctagcagaagacaagaaataactaagatcagagcagaactgaaggagatagagacatgaaaaacacttcaaaaaatcaatgaatccaggagctgattttttgaaaagattaacaaaatagatatactgttagccagactaacaaagaagaaaagagagaaagaatcaaatagatgcaataaaaaatgataaagggattattgccactgatcccacagaaatacaaactaccatcagagaatactataaacacctgtacactttatttgcatagaagaaattgataaattcctggacatatacaccctccctagactaaaccaagaagaagtcaaatccctgaatagaccaataacaagttctgagattgaggcagtaattaatagcctaccaaccaaaaaaaaaagcccgggaccagatgaattcacagccagattccacgagaggtacaaagaggagctggtaccattccttctgaaactattccaaaccaaagaaaaaggattcctctttaactctttttacgaggccaggatcatcctgatatcgaaacctgccatagacacaccaaaaaaaggaagtttcaggccaatatccctgatgaacatcaatgcaaatatcctcaataaaatactgacaaaccgaatccagcagcacgtcaaaaagtttatccaccacgatcaagtcagctccatccctgagatgcaaggctggtccaccatacacaaatcaataaacataatccatcatataaacagaaccaataatgaaaaccacatgattatctcaacagatgcagaaaaggccttcaacaaaattcaacaccccttcaagctaaaaactctcaataaactaggtatcaatggaatgtatctcaaaataataagagctatttatgacaaacccacagccaataacatactaaatgggcaaaatttggaagcattccctttcaaaaccagcacaaggcaagtatgccctctctcaccattcctactcaacatagtattggaagtgctggccagggcaatcaaggaagagaaagaaataaagcttattcaattaggaaaagaggaagtcaaattgtctctgtttgcagatgacatgatcgtatatttagaaaaccccatcgtctcagcccaaaatctccttaagctgataagcaacttcagcaaagtctcaggatacaaaatcaatgtccaaaaatcacaagcatccctatacaccaatagtagaaaaacagagagccaaatcatgagtgaattcccactcacaattgctactaagagaataaaatacctaagaatacaacttacaagggatgtgaagtatctgttcaaggagaactgcaaacctctactcaaggaaataagagaggacacaaacaaatgaaaaaatattttatactcatggataggaagacttaatatcttgaaaatggctgtactgcccaaaacaatttatagattcaatactgtccccatcaagctaccactgactttctttacagaattagaaaaaaaactactttaaatttcatatagaaccaaaaaagagcctgtatagccaagacaatcctaagcaaaagaaaacaaaggtggagccatcatggtacctgacttcaaactatactacaaggctacagtaaccaaaacagcatggtactgttaccaaaacagatatatagactgatggaacagaacagagccctcaggaataatgccacacatctacaaccatcagatctttgataaccctgacaaaaataagcaatggggaaaggatcccctatttaataaatggcattgggaaaactggctagccatatacaggaaactgaaactggacctcttccttacaccttatacaaaaattaactcaagttggattaaagacttaaatgtaagaccaaaaaccataaaaactctagaagaaaatctaggcaatgccattcaggacataggcatgggcaaaacttcatgactaaaacaccaaaaacaatagcaacaaaagccaaaattgacaaatgggatctaattaaactaaacagcttctacacagcaaaagaaactatcatcagagtgaacagacaacctacagaatagaagaaaatgtttgcaatctatccatctgacaaagggttaatatccagaatttacaaggagcttaaacaaatttacaagaaaaaaacaaccccctcaaaaagtgagtgaaagatatgaacaaacacttctcaaaagaagacatttatgtgaccaacaaacatatttaaaaaaagcttatcatcactggtcattagagaaatgcaaatcaaaaccacaatgagataccatctcacaccagttagaatggcgatcattaaaaagtcaggaaacaacagatgctggagaggatgtggagaaataggaatgcttttacactgttttcccaccactgttggtgggagtgtaaattagttcaaccattgtgcaatacagtgtggcgattcctcaaggatctagaaccagaaataccatctgacccagcaatcccattactgggtatatacccaaaagattataaatcattctaccataaagacacatgcacacacatgtttactgcagcactgttcacaatagcaaatatttggaaccaacacaaatgcccatcaatgatagactggataaaggaaatgtggcacatataaactatggaatactatgcagccataaaaccaggatgagttcatgtcctttgcagggacatggatgaagcttgataccatcattctcagcaaactaacacaggaacagaaaaccaaacaccacatgttctcactcataagtgggagctgaacaatgagaacacatggacacagggaggggaacatcacacaccggggcctgtcagggggtggggcgctaggggacggatagcactaggagaaatacctaacatagattatggcttgatgggtgcagcaaaccaccatggcacatgtatacctgtgtaacaaacttgcacattccgcacaggtacctcagaatttaaagtataataattaaaaaaaaaaaaacagaatttctgcaatactataggtgaagaaaaaaaaaataaaactgacaatctttccaggaactgaattataaagtcagcagaatttcagagaaagtaaaattttaaaatagtcaagtctgcaatgcctagaccaaaactttgattagtacacatgaaattaaaatatccaggtgtatgactcaaaaatcttaaatatggctgggttagtggctcatacctgtaatcctagcacttcaggaggccaatgtgggatgattacttgaggccaggagttccagaccaccctgagcaacatagggagaccttgtctctacaaaaaaaaaagaagagagagagagagagaaatagcagggtcaacatggtgcacacctgtagtcctaactactcaaaagacagagtaagaatcatttgagctcaggaggtgaaggttgcagtgaactataatttcaacaccgcactttagcctgggtgacagagagagattctgtctcaagaaaaataaataaatacaataaaatcttgaatacctggattctcttaaaccttctgggtccaccagaaaggatccgtttttccttgtaaaaaatgaacactgctcccttcgtttggctttgtccccacccaaatctcatcttgaattgtaactcccacaattcccacttgtaataggaggaacctggtgggaggtaattgaatcatgggggcgggtctttcctatgctgttctcatggtgctgaataagtctcatgcaagctgatgattttaaatatgggagtttccatgcaaaagctctctctttttgtctactgccatccacgtaagacatgatttactcctccttgccttccaccatgattgtgaggcctccccacccatgaggaactgtaaatccaataaatctcttttttttgtaaattgcccagtcttgggtatgtcttcatcagcagcatgaatacggactaatacagtaaattggtatcagtagagtggggccctgctgaaaagatacccgaaaatgtagaagcaaatttggaagtgggtaacaggcagaggttggaacagtttggagggctcagaagaatccaggaaaataaggaaaactttggaacttcctagagacatgttaaatggctttgaacaaaatgctgatagtaatatggacaatgaaattcaggctgaggtgatttcagatggagatgagaaacttgttgggtactggagtaaaggtaactcttgctattttttatcaaagagaccagtgacattttgcccctgccctagagatttgtggaatttgaacttgagagagatgatgtagggtatttgatggaagaaatttctaagcagcaaagcattcaagatgtgacttgggtgctgttaaagtcattcagttttaaaagggaaacagagcataaaagtttggaaaatttgcagcctgacaattgatagaaaagaaaatctcattttctgagaagaaatccaagctggatgcagaaatttgcataagtgacacggagccgaatgttaatctccaagacaatggggaaaatatctccagggagtatcagaggctgtcatggcagctcttcccatcacagtcccagaggcctaggaggaaaaggtggttttgtttccggccccagggtccccatgctgtgtgcagcatagggacttggtgccctatgtcccagctgctccagccgtggctgacaggggccaatgtagagctcaagctgcagcttcagagggtgcaagcctcaagacttggcagcttatacatgatgttgagcctgccagtgcacagaagtcaagaattgggctttgggaccctccacctaaatttcggaggttgtatggaagtgcctggatgttcaggcagaagtttgctgcaggggtggcactttcatggagaacctctgctagggcagtgcacaaggtaaatgtggggtcggaacccccaaacagagctcctacttgggcactgcctagtggagctgcgagaagaaggccaccatcttccagaccctagaatggtagatccaccaacagcttgcaccgtgcacctggaaaagccacagagactcaatgccaacccatgaaatcagcctggaaggaggctgtacctgcaaagccacaggaatggagctgctcaaggccgtgggaacccaccacttgcatcagcatgacctggatgtgagacatggagtcaaaggagatcattttggagctttaagatttgactgccctgctggattttggacttgcatggggcccataacccctttgttttggccagtgtctcccatttggaatggttgtatttactcaatgcctctactcccattgtatctaagaagtagctaacttgcttttgattttacaggctcatagacaaaagggacttgccttgtctcagatgagactttggactgtggacttctgagttaatgctgaaatgagttgagactttggggaactgttgggagggcatgatcagttctgaaatgtgaggacatgagatttgagaagggtcaggaatggaatgatatggtttgacattgcccccacccaaatctcatcttgaattgtacctctcacaattcccatgtgttgtggaaggtaattgaatcatgggggcaggtctttcctgtgctgttcttatggtgctgaataagtctcatgcaagctgatggttttaaaaacaggagtttccccatacaagctctctctttttgcctgctgccatccatgtaagatgtgacttaatcctccttgccatccaccatgattgtgaggcctccccagccacatggaactggtagtccattaaacctctttcttttgtaaatagcctagtcttgggtttgtctttatcagcagcatgaatacacccctttacttgaagatgatgcagagacttctgcctttcaagatagcacatctccctctgaagattcatctcaacctttgcttggagcatctggtgactgaagaagaggccaaatccatgaataatcattatacaatgagtgggcaacattatatggtgatgattcaaccagtccttcttcacagaaacctatgaccatttactcaggtaatcataaactggagatagagaatacacaaaaattttaaggtcacattgattatacagaaactcaaaattattcagaactccatgtcagagtggaggtagatggtaataaatatattcatttggtctagtttacaatggatgcaacagggcatggaacaacccagtaagtccttcctctatctttcacattctattggaagagacatatttagtagttgtctgacatcttcccaaccccaggatttttgcttggcatttggaggcaagagatatcacgggaaagacaaagtggatacttctgtccagatatgacaataagtagttaggctgctggatagcctaagaagaaaatgataaccagcagctcatagcccacaggggtgagggtcaagatcacccactggattagccacctaggctagcaaaggtgctaaccaagagtgaagagaatcttgaatgggtagaagagaaataagagaataagtatcagttgcagcctccagacaagctattgcagcatcagggctattttcaactacatatttaaatgtaatggcttggatatagtgtgttaaagaaaatatattattaattttaacttttttgatgtggtgatttgaaactttaaaataatatatgtatcatggttgtggcttccattacattcttattggacaagtgtgccctataatatctacatataaccaaaatgtcatctaaaacctctaataaaaatccatcagttactaaatacatgttttgtagctgacagagtaagatctattcaggtggccacactctgcagaagaataaagtacacaatgcaagctaatgagaatctgaaaaaggaaaacatcctttcagccaattcctttctccctctttagaggaatagcataagtactacccgtgaaacaggacagaaagctgcaggaatatgattatttataattttaaaagatcatgagactctgtcttagatgctttatctgaactcaaaacctatatccatatcaccacatcacacaactatatctgcagcagttgaatctgttcagattgtagagggtcctgcagagctgcatgcatggagaaaatgcatcctaaaagtgagagctcacagtaagatatgatcattacattttagaaacaaagtttaaaataaagcagtgaccacaatattcagtcatccaccataaaattatgtgcagtaatctccatttctggatatggattgctaaatagcaatatataaacaaacaatatcaaagtgcctttttggctaactgccactctgccacttctgaactgaagccaattatgacatcactcgagcttcttgtcctttgctgaccttcctactcatgttgccaaaatgtattaaatttctcctctacgatttgtcttattccctttgtctttgtttctttaaataatgacttgacatcacttgacctcaacctacaattttggctggtaatatcactgagcaattcacttacataaatggctttgcataatcatccattgtgtcacagaaaaataatcgtgcaagaaaaggttgaatttgtataatgtagaactgaagaaaattattttaatattccaaaaatcatacatccatttagcaggtaagatggaatattctatcaagctgtaaaaatccagtttccatggtactataattaataaaatgtatagttagtaaacccatctatgcatactgtttattttagtattgttcaagtgaaagtcactctgtccattaaatcaaaaataaaagtgatccagtgaaattgcttggtcaatgtgcttgtagtttttcaattcagaaatataccctagttttataaaggattgaaataaggcatactgatcttacatgcattagtccaagatgagaagtcctttccctgcgaagggaccttaggcatctgccaagttctggtgatctattacatgtaacaatgttttctctgcattagctaaggtcttcaagcataatcgaaatcctagatatatttgcatatccacatatgctaaggaaaataactgtttatcaatttgataaaaaatgaatctctttggcatgttaaaagttttttctgaaaaaaatagagcccagctaataaaaaatattttctgatagaataattatgtaataaaatgtgtgctagtctgtattatgatgttgacccataacatagttagagctcaatcaactatacttgcaaaatagtagcacttgtttgtacttcgtagtttacaagttcttttcacatgtaacattcagaatcttgtaaaatcttgtgacttaggaaggacacatacatattattagtctggtttagagctgagaaaacaaaggcccaaggacatgctgtcagaaaggatcaaagccagaacttgaattcaaggtttctgaatctgaatttcaaatcctttctattatatataactggaaaagagtatctggattctttacctaatagtacctgaaatgtgagtatacatattgaataactatgatagggctattgggactcaccagtctcagtgaccaaattgtggcagaaaaaaataacataatgaatgattggtttctttttttcagtgatttgcttttgcagtcattgatgattcttaagtgccagtcttcctgtgcactataacacaggctgacaggtactgcctcccctcagagctcctaatctaaaggaagaaatacagtacatatctgtgcatccagaacatggagaggtgctgtagcagagtgtcaaaaaagaataagccacatagagaagagaaatcctgagaaaatattgtggtatataatagatcaccagaacttggcagatgcctggggtcccttcccagcgaaagaacttgtcatcttagactaatgcatataagatcagtggatcttgtcttcatcctttgtaaaactaatgtgtagatttctaagacaatttctagcttcacattattattatcctatactctcatacaccattggaggagtatcaattagtaaaatctttttggagaacaacttgcaaaatcaaaaaaacatgtacacattgactctgcaatttcactggatccacttatttccacctctactattagggctggtcaaagtcacaatcatgtcttatctggactataatggtagccttcttacactggtcctcctgcttccacttcagtgccactacagtatcttctttctacagtgatgggagaaatcatcctaaaaggcaaatcagatggtactacttccctacttaaaaatctcctcatgatttacgataacacttgaaagaaaattcaaatttcttctctgacttacaaaacccccagaagtctgtctttgtttctaatctcaatcattctactctcttgcatgcaccacacattgactaccctggccttctttctgtttctacatttgggctttgcacaagctgtcccatctgcctcaaatacccttctgtgcttatcccttcaaatttcaacttaaatgtcacctcttcaaacgggctgtacctgacaacccaatctaaaggtgactacctaaccaatctgcagcatatcactgttttaattctctgcacggcattatccacaatgtgatactttccttatttatttatttatacaattaatttttcatgcatctatttttgaatatatgtatgcatgttcatacatattttctatttatttgtttattttttccttccctctatgcactccagagaatttaagtttataagaacagggaatccgggcatggtggcgcatgcctgtaatcctagcaactcaggaggctgaggcatgagaatcgctggaacctgggaggcagaggttgcagtgagccgagattgtgccactgcactccagcctgggcagtggcagcaagacaccatctcaaaaataaataaataaaataagaagtcctgttccattcacgagtgtatccccagatccaataacaatgcctgactcataattggcacttaatcactgaatttttaattctaataatgtaacctgtgggcatttttccatgcactatggttccaagtatgcacaaagagtaaatttccagcttccttaactcatgcattaagtgcctactagttgtgatgcctgaagaactgggaataaaatcggtgtgggatgaatatcagatgacctagaagaaaatttgaattcacattgaaaagtgtgaaattaaaaaaaaaagaaaaacacctaatataaaacaaaatttaaatgttatatagggttcattctgggcatccaacattcatctaatggaataatagaagaaggaacagagaagacaaaatgaaagaaaaacatcaaaaaaaaaaaaaaaaaaacacacacagaaaaattctttgaaagctaaggaaaaacaagtctccaaaatgaaaagtgcctattaagtcctaagcaggcagaattaagctaagaaaaaaaaaaagtacatgtattttcatgaaggctcagataaataggagattgtaaacatacctacacactcttcctaaaaattacttgaggatccactctagcaaaataaataagaaaatatcaaaaagtaaaagacaagtggtccaaaaaattctagaacaacacgggagctcagtaaaaaggagacccaatattatggctatgaaatagacttgaaaccaacggataccaattagaaaagcaaataggagaactccagaaaaaaaatgtctttaggacaaagaatgaaacagaaatcataacagattatatgtcaagaatctaaaagatcttaattaagtgataagtaaaacaacgtagaagtcaattagaaactccagttttagttttctgcatatggctagccagttttcccaacaccatttattaaatagggaatcctttccccattgcttgtttttgtcaggtttgtcaaagatcaggtggttgtagatgtgtggtgttatttctgagggctctgtcctgttccattggtctatatatctgttttggtaccagtaccatgctgttttggttccagtaccatgctgttttggttattatagaattgtagtatagtttgtagccaggtagcatgatgcctccagctttgtagaatgctatacaagtaattcatggttcaaatataaaataaactaaaattaagcatcattttgagaaaatgatagaaagacaatccatttaatcttgatatttgaaacaatctatataaaggaggattatttcaatgacttagaattatatttattagctgtaaatccaattacactacctgattttatagtaaataacacttacattttcaaagtattgcaaaactctttgctttcagtattcagaatcagtgtacaaagtgcctaaaatgattatatttgcacaataaaatgtaaactttatactttgagagtgaagatgtagttgacaggagtttagaagtggagacttgtgagaagcatgccaaaaagtatcaattttctctttctaaatgaaaaaaagaactaaaaatttatattttgtatctcgagttataaatgctaccaatagaaaaacaaacataatatataataggtaaattaaagattctgattcctgtttgatccagaatcaaacaggaatgattttcctctgaaagttgccttcagtcatactctgaggtttctctttccttccattactaatatctgagcacatcctttggctctctggtcactttcacttacagaaacaaacgtaattttgtaataaaagacttatgttgaaaaggtatacttttgtctaaatcagaatttcaaatttgtatccaattcaaacatctccctttatctcaagccccttctttagcaagctctgagccttgggtcaaaggagaagctttcattcaacatcctgttacaaatgtaatcaacaaaacttgggggaggaatggggaagtataaattagataaatttaccatcttttataccatgaaatctattactactcttataaagttaacatatcaagaaatagaggtataagtacactgctgaaaattatgatagtaaccactacaacacctaaaaacagaaataagtagttaccctatagagtgggactgtgaacaggtgattttttccttccatttaataataccttgtagcctatgaccatagttatgctgaacatatatgacattcatatgaataaacaagtgatgaaagaaataataaagcacaatgttagaagaagggagtagttaagattgtcagatcatcaaatttctttgaggagtcaaagtaaaataagaattgaaaataatcatgggatttagcaacatgaaggtcattgttcacattaactaagaaaattttactggagtggccaggcgcagtggctcacacctataatctcagcactttgggagacctgggcaggtggatcccttgagctcaggagttcgagaccaacctgggcaacatgacaaaaccccatctctataaaacaaacaaacaaacaaaaaatcagccaggtattgtggcatgcacgcatagtctcatctactcggggagctgaggtgggaggatcacttgatccaccgggtggttgaggttgcagtgagccgagatagcaccactgcactccagcctggacgatagagtgagactttgtctcaaaaacaagaaaataaaagaaaattttactggaataattggtgtaggtgaagtaggctgagaatgagtaagcagtgagaaatacaagacaacaaatactaactctctcaagatatttggcttcaaggaggagaatagaaatagggctatagtttgaaagtggagtacatactacttgcagtctttgacatttttattttaagataagagatacttaaacacatttaaatgtacatggaaatgattgagtagaggaatcctggtttagtgactggggaaagagaaggtaagctaataagtttcctgagaaggatagcaggaatataatcagaagcaagagatggaagactggaccttagctagaaagaagaatagtactatcttgtacaagagaactgaagacaaaatgaaggtagatacatccgtctatgagtacatgaatagatttggtgacaaaaagttgagaagactcacccagtggtttttatatactctgtgaagaatgtaacaaagttacatgcagaagtttgaggagagtagaaaagttgtgaaatattttttgcacagaatgggagagggttgaccagtaaagtgtagcaggctcactggtcaatattaaggtccaagtaaggaactaatgaatggaagttgaaagcactatgctgagttcattattttctctatgagtgctcgtttgcttatgcacattcttagagaaaccaggtatttcaggtgatgaagggctggtactttgccagagagaagtgatgaaagacagaagggcaaggcaattttgcctatttttagagaggtattgaaactggcgtagatacgtaatttatgaaaagcaatataacattctatttttctctaactgaacttgattttactttcaatcaccatttatccctgaggtggaaaatttttattcaaaaaaaattactaatgcatggaatctaagccagataggaagcaaagtgaagacagtaaagggataacaacaagggagatgacacaagagagactaagcctaattctcacctatggatgattatgggtctatgaatgttctgccagcctggttcagaattggctccataactggataatgctggatctgaaggtgctggactcccaaactccaaataatccatactagggaaaacaggggctgacaataagaaactgccagaagcataagctgactagaatattaataagtccatatcttggcaattataatacccaaaggcctttctatccacttttgcccatttcagttttgtcatgtgattttcatttagacggagaataaagatatgtggtcattatgctagtttcactggatgctttaaaactaatgccactttcaattcttgtttctaagacaagtgaaattatctctggctgcataagcaaggtggtatttagtagtctaaatctctctcctgtatttaaaattggtctctgtctctaacattagttatacaactctctaccctttgcattttaggtgaatcacagccacaaaagcttactcagctggggtgtttcctaatcctatcaactcaagtcagagtcatctttttccacctacatacacttagctttcaaatctaaaatccaaagaaacatttaaattattaaagtcaatcttgtgagacaggatttgtcacaatataggacaaataatttaaagaaattccactttaaatttgaacttacgttgactagtcaaggctcttttccaaatcaaatcagtaaaatagtatttgctatgttttagcattttgttttaatgatcatgtttgggcattgtttttatgttttattatttttactactcccataatatggatttataatgtaacaactatctattttatatctgctatgcttgaaatactgtgttatgtgccccaagcttaaaaagtagaaagtcacaatttttgctttgtaagttctaaatcctttgatgtggatacacaagtacacaagtataccttacaatagcacttgaattaagtgtggaaggagtcttgagactgtgaactaaagccgagacaggcagaacttaaaagatggaaaggaagaagagatatctaattaggcagagatgaaggactccaacaaaaccccatatttctcaggctgagtcaatggaagaaaagtgttatatctggcagaaattggatatttaggaataatgagttgttttgtggaggaaggtgataaatctgttttgagaaatttttagtttaaagaaactgtggaacatgcaaataatgatgtctagcaggcagttggaaatgggtagccagagctttggagcggagctgtagatctcggagttatttgcatgaagcaataaaagctgctacaatcttaatggtgagaattggataaaaacaaattgtgcatggggtggggtggtggtatgaggatagaaatctggagcatttggggaagaagaaaaaaacgcaacaaaaggagacagtaagggacataaatatgaaactagttgtcagagatacccaaagagccaagataatataaaaaaaaaatcagaagagaaaaaattttcattaagaacagtgtgatcaactctgtcaaatgccacagagattttggaaataaatcatttcctaaatcactcagtattgtcaatcttgggaatatagcgtatgttactcttaatgagagctaccaatattaattacttttcaaattaataattatattttaattctctcttcaagtttaagaaagaaacatacacataaaaatgtatctggatttgtctgagttgagcttctcctttagtaggcagggatttgcaggtgtccccagaggtgatgactcccttcatcattgtaattacacacccttttcttaccatcatttccaagtacatgtcactggtctcggagcaggaaggctccttctcccaattcagtgtctgtcagaagtcttccctgttcatcagatttagtcactcaatgccgcctaacagttggagaaaacattgagagccagacttagccagacttagccagacttgtgggccacagctgctaaggttctgaaaagcattgcactgaaaattaaaacccactaactgaaaaagaaaataaaaattcacagaaattagtttctaaagatcatggcacttggttgaggagatatttagagaatcgacccttaaaataacaccacgtaaacaagttctaatttaacatatcccaagagtgacattgtacttgaacaagtttgactaagattattctgtgaattttttaaagccataccacaatgctattattccaatgctagaatcatctttctaaagaggacctcaaagatttggcaggtaggggagtagcctcatgtagtcttttctctgcatttcaaagattctcctgttctagattgatgaggagattcctgatgccaatattttctagtagtctactttcactgatagaagcagccaaagagaaatcttagtgtcctgcacacagctggttaacttacatttgcctttatagatgcattgtattttttgtctttgaaagtgcttgatcatcttttcctttttcaaatgctattttcttttttctagaatatgaaaatagatgcaatttaagttgggaaaagtcaaaggtgacattaaaaaatatttcacaactaggtaagtaactggggcatgggaaagaaggcagttagaaaggtgggaaggctcttggggaggctcaaaagatggccatttaataacagagagagttcagtcgtcttttaacaaatagtatgttcttatgggttcctactctttggattaccaccctgagcaaactttttctttatatgattcccttaaatctaaactctgatttgtgaaaacccaagagaagccttccacatgatttcactgcttgccaggttaaacctgcaaaagatggtgtatccatatttcgtgacttggctctggccagttagaaaaaagacaagcatatggtattactttccatgactgatgactttgctctgctgacacctttccttcccacactgtttaccctactaatgtagccacacaaaagaagtcagcctaaaaatgtcctcagaagctctcaagttagataactcagaagtttcttgtgaacataagttgaaggtataaagatacagagtcatagtgttggtctggaaagaaagaacaacctatttttagtcatggttagcacgaacctatgtcttggatcttaccatttcaaatagcttgtgccattttttaaaatcatgttcaccactttttggttgagtcattgtagtctgtaattagagagcctataacaagttttatataaaatttaaaagtacttactaaaaaaataaaagagtcaaatataagaataaatacatggtgagggatagggaagtgtggtatctacaggagtcagatacttcctttgtgcttcctaaattaatcaggaaagatttattgaaataaagggcttggaaaccttctttcagctaaaaaaaaaaaaaaaaaaaagtctttcaagtagaccaggagagagaatgtatatttttcctgagataagttggttaggaaaaggtcaacctatgtcctctttgtggccatcttcagaacagttagataccgaagagcccagagagtgctgtaaattgaaaatacaattttaatgcattctcatcgaagttgtttctcttcacctgctgtctgcatgttctgcctaatgttttgttgttgtggttgttgttgctgttttgagacagagtcgccctttcacccacgctggagtgcagtgacgcgatctcggctcactgcaacctccacgtcccgggttcaagcgatttttctctctcagcctccagagtagctgcgcctacaggcatgcatcaccacgcccagctaatttttgtatttttagtggaggggggcgggtttcaccatgttggccaggctgctctcgaactcctgacctcaatgatccgcctgcctcagcctccaaaactactggggttacagctatgagccaccttgcccaggatactgtctagtgtttttaaaatgcaaatgtgatcactttttattaatgtgacctagacatatgtttcattgttcaagaaaagcactctccccttgatttctaaaaccagaaaatataaagctgagagtgattatttcattcatgcaacaaatatatttgtgtatctattacaggttcagccttgtattcattccattcttcatttcccacatgcgaaatctaaaactcagagatttgaaatctcttaactgagttcacaaatcaggacaaatttttcttagaatacagaaatagtttgagcctatgaaaactaagtctgtttaaatccaggtagtaacacagttggtttccttcttctgagcctttcaggaaatattaatgtagaaaaaaatctgctgttacagacatgcaaggtgtatcttgccgcatgagaattacttaatgggtacaatgcacattatttgggtggtggctaccctaaagccttgacttggcccccatgcaatctaggcatgcaacaaaattttacctgtgccccatacccttatataaattaaaaaaaaaaaaactttacaaaggtcaggtcatccaagaatcaacagcatttagatagatgttttaggtccctgtagctcaaagtatggccctgagattatcagcacctgggaacttattagaaatgcagaatcttaggccccatccagagttcctcaattatttctgcattttaacaatatcctccaggtgatttgtatatgcattattaaactttgaaaagtactgttttaaatgatcttgaaaataacttataatcttaaaaatgcatgagctaaaatgtgtgtgttttaatgaaatcaggggtatattattattcaaagtaattccagtgtgaatcttttcaaagtgaagaatctcttttaaaaacaaattatctccaatctattttggatattaatagggatttgtttgtacatggacttcctattgtataagatgaggtcaatataggaatcatggaagcaagagtgtgaagaaataaaatgccttcaaaagaatacattgaacaagcaatacataaattgcttttatttagaaatgcattagttcaaagatgatttatacagaatttattttaattcagtaagatgttgggtgaaattacctttcactatttataaacaaagataactctatattaattccaaataaaaaattttcattcttagagaaaagcattattttacaaattttcaggtctctatttacacacaagtaattgctatgtaagcaagagcaagtattgttgtttgtacactctactaattgcaaatgattcttagctagtaattaaagtaactttaaaaagacaacatttggtttacttggtttgcctggctgtgcacataaaaataatcaaaccgtctttaaagccagaagactatccatgaatttagagaagtctaaattaggctgctttgctaaattttaactgattactcatttaatatctgtatcttttcttcccctaaggtccttttaaagtacttaaggactatattatttctagtttattgacttttaaaactctaaactaaatagagagtatgacatttctgtcaaatctaaatcaatatcttgcatataacaccagtgtcttaacctatatgtgcaacattttgttttgtagagtaaaaatctttatggctttaaacatcaattttattacttttaagtccacattgcctggtaggtgtcctctgatcatcatccttccaagaataaccccatttttagttgctatttcctatctgcaataagaagcttttgtgcatattttgaaaactttgcctaaaattaaaatgtacccaaattgaaaccagtgtttatagtgtaatacatatctctttttagcattacaatgaaaatgcttttttacacatgcctgaaatttcaacagctactacggtattttccctatcttccttaaaaaaaattatcattcaaaataattccaatttattttgggtatgaatagagattttcaatttagaaaatgagtaattttattgttacgactgttatagccccatgaaaactatattttgccaatttctattggcctgtgtcattttatcacatttaaaatctataatcacactagcaaatataattttgcctgactttttagacagtctctaaacttaaaagttttccaacagtatgacacacaactttaggggcacatgcagcatatgcttttattgcatgtaagtccttggacttttatatttatttcatgtattttaaatatttcttgaaatcaagagcgttaatattattagtaacaaacatctgtggtcattttcttccatttgtcacatagctaatacagagtatatagtattacttttgagtggccttatgtaacatctcctttctaaattcctgaaagtaagttacgaccagaattacatactaaaaagagtcaaagaatacattacctacttctataaatggataattttatagtaatctaaataaaaatgagaccagaataaatatttttctagccttctctggaatgctaagcagtgttggggagggagttaataagaaagagagttaaaagtaaacagtgcttgtagtttaacagttgtctcttagggcactgttttatgaagatctttcagaaaagaaattttcttcagattgcttatgctgtgtaaatattacctcagataagggccacattttgggtaaataagtctgcataaacataagactgctttatgttggtatccttagtttttctgtattaattcaaaattcaaaccacaattccccataacacactctataaaatggtattcatgacttcatacagcgaggatgatgttttcctttataaatgccacattaaatctgtatatttttaaatggaaaaattgtgagaataccaacataacaacaggttgccctccatcctctgtccaataaattctaactttacgtttttactatctgacagaaatactttacagtcttgagggggggaaagactgccttttttcttgtacattgtctgtgtgactttctgttgagaatgtattatgtatcaaggacattaaaatttatatctgcataggacaagtttagagagtatattttctccaaaaataatactaggaaaacttaaaagagaattttaccacatagaaagaaaacatgaaaataaacttttgaaatatatgtgtaattaccaaaaatatgctggaaacaactaatcttctgctggaaaaaaaacaaataacaataaattatatctattttaaattgactctgaatgttatagtcacgaacaagagtttagcaaacctagaaggttaaatcttgatttatatatgtttttatgttaaaatatgtttttcaattaccaaaattagtaactgttaccaaaatataggaattcatttacatagctataaaaatattacatttaacttaatattgaagtattaaaaacagtagataatcatgctcagacttattaagaggaagaaaaccctttgttgccattacatagttgacaacaaaatatcagtggaagattttcttcttaaataaagctaaggagagcaaatagctaatattgcaactcttatctagtctcaggttatattggtagtagctccttaagctgactgacttatactctgaaatacatttatttaaaaaggactgggccctctgttgaatatacaattcaattttagtttcgacttcattagctgaggtaaattatcacattggcatcccataatatcatttcactttacttagaagtcttctagatctttccattccatatagttagttctgtctctcctcttttcttttttttataattattttggatgaacatttggggaggtagaaatatttcatacgcacacattatatcctatacacatttaagagactaagtgtctggctttctggctcccaagatgatatctagaaaaattaatagaaattaaatctatgccctacccagtagactattagaagctctttcctaccgctgtgtcctacataaaacacctcatactccagactgtgaggtctgaaaacacagaaaagcaaaaaccgtgttcagcaatgaaaagaacatgatttgtcacgtggcagggatttccccactgaccaattaaaataagaagccccatcttctcttctttaactagaggatagtcataacaaaggattttttttagtaggcgataaaatagagagaaactgatgagcatcttcaaggcttctcagggacattaaacatccccctaacaaagactagagagaagaaacacactggtatgcttcatgttcttttggaatatttgggtatcttagagagacactaacaattttgtcctatgagatcacagtaaaaaactatatattcagccatttcaaactcactttagaaaagaaaaaagtatacaaaatgcatagctgattatagctgtcatttctattcttttgtatatatcacatgacaccaatgtcaaaaattaattataaaagtagttacaagtagttacttttataattatacagctaaaaatgaatataagttatatttttactcatggttttggtgttgtcaaagctcatatttcagcataatcctttatttgctgttgagttgtggagtttatttggtttttaagtgcaatttattttttctttatttgtacattaattattgaaaaaaacaagaagaatattaaataaaaccaacatacatggagatatatcctgtagtagaatgctttctttggctttcatgattaaaatgttaatgaagtggacaagcagttctttaataatatgaagcaataaacataagggaagaagaaggtaaaaaaataaaatgatgtgactcacccatgtcaaatattgcatacccatcaccaaatctaaaaactattcacgtaggtatattgtagtccatgtctttaacatcaattacaaccccccctttcctcaagattagccacaggacaaattagaagctgctctgtggatgctgcttctctttaaaaactggtttccctgaatcaataatactgaacttgacctagttagaaagtatgttcacagaaataaccctcagtcttcacctgttaaaagtgaagatttattgcttgggtggctgaggctagaagatcatttgagcctaggagctggaggatacagtgcactatgatcccccacctgtgaatagccactgcactccagcctgggcaatataacaagaccccatctcttaaaaaaaaaaaaagtttttaattaaaaagtgaaggtttattgacattgtgacaacatggataatacagattaagtcagcaaaccataaagattttccagtgtgcctaatgtctaaaattataatttagttatcatttagtagttccattaaattattttctatacaggtaatcacgtatttgatttcttttccaatataggcaattttaaactcagagagctggaactaataaaacctagggaatggaaatctaaattataaaccattcttttacagattccatgattaacctttgaaaaaattaagcccaacctccaaacacagactatataaaaattatttataatttgcaggtattagtggcttaatacagcatatatttgctatcagcttttgcattttaaaagaaaaattaaagacaaaaatcttaatacaaagtaataaactactaatcataaaattctctcctatattcttttagaacacaatgaaaggaaattatttgctttttatgagaaactgatatactttctctccatagatgatgaaaataactttctttgactaccaagaaatatataatcaaatttgtagaccacttttaattttttaaaaaaatcctggatctgtattttttaccttcctgacctcttactataatttatcttttctctggtcctgaatctctgtaagctgacttgctttcaggggaatgacactgtgcacataatacagcatcacctgggtcttccaagatttggtctccaccatcacctcaccaccaccctgtcccacctgtccacaaacagtttggaagtttcctcttttcagctttcctctttccaaacttaagcttccgtatgtacaatgtagctctctcctacttaaagaaaaataaattcagagtgatcctcctaaagttgtgaaataagatcagtctgtagtttttccatctgtcctccgttgagtcctcctggtcaggctcccaggacctccaacatgtgagatttgtgcctctacttgacccttggcatcgaaccaagccaaattcctcttcagatgtagatgggcaatgttttctaatttacacagggcttgtaccttaccccatttactcaaataaataataacacttaaattttctacattacatgcacacgtttctcaaaaaaattatctacggaatttatcttaattgtatttattttaaatatttctgggaaagcattcctagggaagacttcttagttccatttattgtcaaagaggaaatggagtggggccttttattttttgtgtgtgttaaatatagagtattaattggtataaatattccgggtagaatttctaaataaattcaaaacatgctttgtttttagaaaagatacatattaatgccctaaacctaaactaaaactaaaccagatgaaatgctgtgtcttaacgcaagtcaggcaccatttacttgcctcccaaagtttccagtcaatctaccttcaagttgcacagtgctttccattcagcaggaatggctgctgttctaaatgctgaagatttttattttctcatttatatccttttaacaagtaattaatgggtttaaataccttcctgcatgattacaattttctcttattagcttttagctgtgtgtgatattcaacatccattcctctttgtttttagaaagtactttttaaaaatctgaagtttaaacacagggtataaaatttctatttgttttatatttccataacatcaaataataatctctctaaacttatattttgaaatacaaaatacttccttcttcctctggatcaacaaaatgggtttaattaatcttatgcccttatttaaggttttaggaaataataatcgccattctttagcaggcaaaaattatggatacagtagttacaataaattaactcaaatgatctcacaaatgaaaaaattttcccggttaagagtgtaaaaactctactgtcctaaattgtctcccagtcacactactgttacttaaacaacatatctcagtaaaagtacagacgtcatttcacatttgtcaactcactaatttaataaccacatgaaaaggcaatagaattataaaacatgtcatttttccaatactctaatgaaatttttcatgtatatgaaaattcacttacttgattatgcattttcattactattactttgaaaatttatcaaaacaaaaggagttgtatcgtagccaaaaagactttttaaatataaaatttggtctaagtaagataatattttataataacatgaactacgaaactacaactatatatatgaaaaaatattgattttggtaaaaactttccagcttgatccaaaaaattttttatttttaaaacaatctatatctagttacttatcaactgatttccagttgttcaactgactataaactgctttttgtttacaaaaataaattatggtaacaatttaagtactaaaatatttgaggtttttctttaaggttaatgtaaatttagtgctgacattttaaaaattactattaagatggccattgattacaatgattagtgaatataatcaaaatcatgaaaccaaattatttaagtggacaagctgctgaagcaatcatattcatttagaggtgagaaagtgcaagttgtctttttaactgaaatcacagtaaaatcaagaaaaaaaagaaactcccattcacattctaagtaaaattacatgaccaaaaaaagttatttgcatatataaaaatgctttcaaactaaggtggatgtgtgcatagaaatccctatgaagaacccagattttgtttctgggaaaagttagcacattctcctggcaaatctttcagagtctatcattaaattaccagctatagagaaggcttttaccaagatagctaaatttctagttgataactttaagatttgtttaaaaaaataacttcagtattgcaaataataagaattaatttttctttctacagactaaaaggttttgttatactcccaaatctgtgccatcttctgcctgacacactatttagagctgctcttttgtgttagttgtttttcaaacttcactagatgatctcaggaacctctagggatttaaatcatcatgaacaaatgatagcgtcagactgatacgctattaaagcaaaagataacttacattcgtaacactagttataaataataataggacattagagagttttattagaagaaaaattgcctgaaaaacttcctcctattaggttaaccttctagaatttctcaaacaaaccaaattatttctgcaaaatcaaagtcaatacctgagtctgtttataaaaatcaccaattcacaatgcaactatttttttcttttcatttaacatttttaaatgatttcttgtcttcttttgtgttttagctgaatttgtgtgcagcacattgttgctccagcttaaaaacctcctgtgtggtaaatgcttggcagccctggggaaggcaatgaacacggtgaaattcagtgcagtgtggtaagacaaggagagcatgaataatatttggagatctagcacaccttagtggaaacaattattattacaactgctttgaagacatttgaattttaaactccattgtttgtgaaattctattttgactaaatagagggactttgttcaggcttttgttgtctttagcatgatgtgtttctttcctaaactccacacagataagaagataaatttgatcatgaatttctaaaagtagaaatcataggttttttagaattagcataaaattattgtacaaccctccatgggctatcaaattgggagcaatccaattttatttgccatcatggtcacatataaagtgtcagattattcttgttagatgattattgtacatttaacttagaaaagcttctcaggtctgctcctgagatgcttgaaagacttttggtttaaataggttgcatatgttctgctgttaatggctgaccgtttttatttcatattactaaaatgtaatcaagaaaaagagagtagaaaatacatcgcaaatattcagtctactatctagacaatttcaaaagctttcaattttatctcctgttccattatcttcaattgtagagtttggataggaaaagaattcaaaaataaatacaaaacattcattccaatacatgaagaaaattagccctgttcatgtacattttctaatatggatatgtttctaaaaatcagaatataatatttatggagtcattagtaaaatgcacttgattatctaagaatctcaactgcttgatgcttgatcaaaaactaggtagaaactaaatcatgcctatcaacaattaaatatttctgaaaaggggacttccaaaatggtagaataagaagctcagcaaatactttccctaaaaagtgacaacaggggtggagccaagatggctgaataggaatagctccagtctatagctcccagtgtgagcgacacagaagatgggtgatttctgcatttccaactgaggtactgggttcatctcactggggagtgtcagacagtgggtgcaggacaatggaagcagtgcactgagtgtgagccaaagcagggcaaggcatcacctcacccgggaagcacaaggggtcagagaattccctttcctagtcaaagaaaggggtgacagatggcacctggaaaatcaggtcactcccaccctaataccgcacctttccaatggtcttagcaaatggcacaccaggagattatatcccacgcatggcttggagggtcctatgcccatggagcctcactcattgctagcacagcaggctgagatcaaactgcaaggtggcagtgaggctgggggaggggagcccaccattgctgaggcttgagtaagtaaacaaagtggctggaaagctcgaactgggtggagcccaccgcagctcaagcaggcctgcctgcctctgtagactccacctctgggggcagggcatagccaaacaaaaggcagcagaaacctctgcagaccttaatgtccctgtctgacagctttgaagagagtagtggttctcccagcacacagctggagatctgagaatggacagactgcctcctcaagtgggtccctgacccccaagtagcctaactgggaggcatcccccagtaggggcagactgacacctcacacggccaggtactcctctgagacaaaactgccagaggaacgatcaggcagcaacatttgctgctcagcaatatccactgttctgcaccctctgctgctgatacccaggcaaacagggtctggagtgtacctccagcaaactccaacagacctgcaactgagggtcatgactgttagaaggaaaactaacaaacagaaagaacatccacaccaaaaccccatctgtacatcaccattatcaaagaccaaaggtagataaaaccacaaagatggggaaaaaacagagtagaaaaactggaaactctaaaaatcagagtgcctctcctcctccaaaggaatgcagcacctcaccagcaatggaacaaagctgtacggagaatgacattgacgagttgagagaagaaggcttcagacgatcaaactactctgagctaaaggaggaagtttgaacccatggcaaagaagttaaaaaccttgaaaaaaaattagatgaatggctaactagaatcaccaatgcacagaagtccttaaaggacctgatggagctgaaaaccaagacacaagcacaagcctcagtagccgattcaatcaactggaagaaagagtatcagtgatggaagatcaaatcaatgaaatgaagcaagaagagaagtttagagaacaaagaataaaaagaaatgaacaaagcctccaagaaatatgggactatgtgaaaagaccaaatctacgtctgattggtgtacctgaaagtgacagggagcatggaaccaagttgggaaacactcttcaggatattatccaggagaacttccccaatctagcatcgtggccaacattcaaattcaggaaatatggtgaacaccacaaagatacttcttgagaagagcaactccaagacacataattgtcagattcaacatatttgaaatgaagaaaaaaatgttaagggcagccagagagaaaggtcgggttacccacaaagggaagcccatcagactaacagcttatctctcagcagaaactctacaagccagaagagagtgggggccaatattcaacattcttaaagaattttcaacccagaatttcatatccagccaaactaagcttcataagtgaaggagaaataaaatcctttacagacaagcaaatgctgagagattttgtcaccaccaggcctgctctaaaagaaaagttttagaaggaagcactggaatttcatgtccagccaaactaagcttcataagtgaaagggaaataaaatcctttacagacaagcaaatgctgagagattttgtcaccaccaggcctgccctaaaagaaaagttcctgaaggaagcactaaacatggaaaggaacaaccggtaccagccactgcaaaaacatgccaaattttaaagaccatcaagactaggaagaaactgcatcaaccaatgagcaaaataaccagctaacatcataatgacaggatcaaattcacatataacaatattaactttaaatgtaaatgggctaaatgccccagttgaaagacacagactggcaaattggataaagagtcaagacccatcagtgtgctgtattcaggaaacccatctcatgtgcagagacacacataggctcaaaataaaaggatggaggaagatctaccaggcaaatggaaaacaaaaaatgcaggggttgcatatcctagtctgataaaacagacatcaaaccaacaaagatcaaaagagacaaagaaggccattaaataacggtaaagggatcaattcaacaagaagagctaactatcctaaatatatatgcacccaatacaggagtacccagattcataaagcaagtccttagagaccgacaaagaggcttagactcccacacaataataatgggagactttaacaccccactgtcaacattagacagatcaacaagagagaaagttaacaaggatatccaggaattgaactcagctctgcaccaagcggacctaatagacatgtacagaactctccaccccaaatcaacagaatatacattcttctcagcaccacactgcacttatcctccaaaattgaccacatagttggaagtaaagaactcctcggcaaatgtaaaagaacagaaattataacaaactgcctctcagaccacaatgcaatcaaactagaactcaggattaagaaactcactcaaaactgctcaactacatggaaactgaaaaacctgctccttaatcactactgggtacacaacgaaatgaaggcagaaataaagatgttcttcaaaaccaacaagaacaaagacacaacataccagaatctctgggacacattcaaagcagtgtgtagagagaaatttatagcactaaatgcccacaagagaaagcaggaaagatctaaaattgacaccctaacatcacaattaaaagaactagagaagcaagagcaaacacattcaaaagctagcagaaggcaagaaataactaagatcagagcagaactgaaggaaatagagacacaaaaacccttcaaaaaatcgaagaatccaggagctggtttttcggaaagatcaacaaaattgctagactgctagcacgactaataaagaagaaaagagagaagaatcaaatagacgcaataaaaaatgataaagtggatcttaccaccaatcccacagaaatacaaactaccatcagagaacactataaacacctctatgcaaataaactagaaaatctggaagaaatggataaattcctggaaacatacaccctctcaagactaaaccaggaagaagttgaatctctgaatagaccaataacaggctctgaaattgaggtaataattaatagcttatcaaccaaaaaaagtccaggaccagatggattcacagccgaattctaccagaggcacaagaaggagctagtaccattccttctgaaactattgcaatcaatagaaaaagaggaaatcctccctaactcattttatgaggccagcatcatcctgataccaaagcctggcagagacacaataaaaaaatagaattttagaccaatatccctgatgaacattgatgcaaaaatcctcaataaaatactggcaaaccgaatccagcagcacatcaagaagcttatccaccatgatcaagtgggcttcatccctggaatggaaggctggttcaacacatgcaaatcaataaatgtgatccagcagataaacggaaccaatgacaaaaaccacatgattatctcaatagatgcagaaaaggcctttgacaaaattcaacaatgcttcatgctaaaaactctcaataaattaggtattgatgggatgtatcacaaaataataagagctatctatgacaaacccacagccaatatcatactgaatgggcaaaaactggaaacattccctttgaaaactggcacaagacaggggtgccctctctcaccactcctattcaacatagtgttggaagttctggtcagggcaatcaggcaggagaaggaaaaaaagtattcaattaggaaaaggggaagtcaaattgtccctgtttgcagatgacataattgtatatctagaaaatcccattgtctcagcccaaaatctccttaagctgatagacaacatcagcaaagtctcaggatacaaaatcaatgtgcaaagatcacaagcattcttatacacaaataacagacaaacagagagccaaatcatgagtaaactcccattcacaattgcttcaaagagaataaaatacctaggaatccaacttccaagggatgtgaaggaccccttcaaggagaactacaaaccactgctcaatgaaataaaagaggatacaaacaaatggaagaacattccatgctcatgggtaggaaaaataaatatcatgaaaatgaccatacttaccaaggtaatttacagattcaatgccatccccatcaagctaccaatgattttcttcacagaattggaaaaaactacttaaaagttcatatggaaccaaaaaagagccctcattgccaagtcaatcctaagccaaaagaacaaagctggaggcatcacgctacctgacttcaaactatactacaaggctacagtaaacaaaacagcatggtactggtaccaaaacagagatatagactaatggaacagaacagaggcctcagaaataatgccacatatctacaactatctgatctttgacaaacctgacaaaaagaagaaatggggaaagtattccctatttaataaattgtgctgggaaaactggctagccatatgtagaaagctgaaactggatcccttccttacgccttatacaaaaattaattcaagatggattaaagacttacatgttacacctaaaatcataaaaatcctagaagaaaatctaggcaataccattcaggacataggcatgggcaagtacttcatgtctaagacaccaaaagcaatggcaacaaaagccaaaattgacaaatgggatctaattaaactaaagagcttctgcacagcaaaagaaactaccatcagagtgaacaggcaacctacagaatgggagaaaattttcgcaacctactcatctgacaaagggctaatatccagaatctacaatgaactcaaacaaatttacaagaaataaacaatcccatcaaaaagtgggtgaaggatatgaacagacattcctcaaaagaagacatttgtgcagccaaaagacacctgaaaaaatattcatcatcactggccatcagagaaatgcaaatcaaaatcacaatgagataccatctcacaccagttagaatggcgatctttaaaaagtcaggaaacaacaggtgctggagaggatgtggagaaataggaacacttttacactgttggtgggactgtaaactagttcaaccattgtggaagtcagtgtggcaattcctcagggatctagaactagaaataccatttgacccagccatctcattactgggtatatacccgaaggattataaatcatgctgctatagagacacatgcacacgtaggtttattgcggcactattcacaatagcaaagacttggaaccaacccaaatgtccaacgatgatagactggattaagaaaatgtggcacatacacaccatggaatactatgcagccataaaaaatgatgagttcatgtcctttgtagggacatgggtgaagctggaaaccatcattctcagcaaactatcgcaacgacaaaaaaccaaacaccacatgttctcactcataggtgggaattgaacaatgagaacacgtggacacaggaaggggaacatcacacagcaggacctgttgtggggtggggggagggggaagggatagcattaggagatatacctaatgttaaatgaggagttaatggatgcagcacaccagcatggcacatgtatacatatgtaacaaacctgcacattgtgcaaatgtaccctataacttaaagtataatttttaaaaagtgaccacaaatctaaagaaaattgtcaaaaacaactatttgaagactccataaattgtccaaaatcatgcaacaaattgagatgaatttattcaggaaaagcctccaggaaggacagtgggagtctggggcatttatatcgggagctgctcccttcccccactaccttccagctttgttagcatggtagatacttgaaggtaggacaagctgtgaaaaatagcagctttgctgttggaggggggatcacttagtttgaagtggagcaccaagcaactctatgtccgggggcattattgaaaatagtcgcaatctctgtggcaaacaaatagggaaggtcaaccacatagctatcctaagcttgaggtcctagccagagcaagcaacaaagtggcaaactagctagaaaatgaacaagaagagtggggaatgagatgatattattgggacttgataagttcctctctgtctctggaaatttggaaggctgcacagatgcacatgtgtaggagaaaccagaaagggccctagccatccattcatccctgactgaatatgaaatcttgtgaatgcacagaagaaatgtgagaggtcctaaaagaaagcaaaagctgaaactgacttgtgaactgcctgaattttgaatatgttcccaaacatacagtcaagtcaatgcaaagagggtgaaaatattactgggtcaaggtagttgagcatgtttcctgaacaatcattggctaaccactaagctatgctgtcacaagggtgaacccctaagaggctaccgttaagaatgctaaaaagattatttaaaaaaaaaaagaaaagaaaaactgagtagaaacatcagagaatgcattctgtcaaaaaaaagaaaaagaaaaaagaaagaaagaaagaaagaaaacgaaaaaagactccacatgtttggtcctggaaaattactaaacacagacaccagcaacaacaatctacaacaacaaaaaaaatcagaatccagagttgcaacaatacattatgtgtaactagacatatgcctagttataagaacaaaaaaaatacagacatgtaaagaaacaagaaaaggtgccccaaacaaatggggtgaaaaggcagtcaggaagagaggcagagtaagatggcagaatagaaagttccaccaactgttcccccataaggacaccaatttaactatcgacacagaaggaaaaaaatacctttataagaaccaaaaatcaggtgagccctcatagtacttggttttaactatgtaatgatgaaaaacacactgaagagacagaaaaaacaatcttgaatctccaatgccagccccccacaccacaaccctgggagcagtggcatggtgcagacagcatctctgggtgctggggaagcacagcaattgtgaggcattggcctcagtgctgtcctgttagagcagaaagggaaactggaccaaactcagctgacactcacccaggaagggaacatttaaccagcactagccagagaggaattgccaatcccagcggtcccaatttgagttcctgcaaaccttggcacttaaggccaaagtgctctgtgtctccaaataaacttgaaaggtagcctaggccataaggactgaaagtcttaggtgagttctagggcttaactgggcccagaagacgatggactttgggggcacatgacgtactgagacatcagctgggacagccaagagagcgttgacatcaccccttctctaaccccaggatgcacagctcacagctcgaaaatagtccccatccttccacttgaagagaagagaggaagagtgtgggtgactttgtcttgcattttggatgctagctcagccacagcaggatggggcactagttagagttgtaagtcctttgatacaggccttagctcccagaccacatttctagacacggcctgagccagaaaataaatcctctgccttgaagtcaagaaacaagtcctgacaacatttatcacctaactgaagaaccgttgggccctgaacaaccagatctacacccagatactgtcaagggccttgggtgagcctctgaggcttactggctttaggtgagattcaacatattaccagcagtggtggtgaagggatgaaattccttctacttgagaaaagcagaggaaaaagtaaaggagactttgtcttgcacctcaggtactaactcaaccacggcagggtagagcaccaagcaggctcctgggggtgtgggggggggggggtccccgatttcagcactggattctcggacagcatctctggacctgccctgggctggaggggagcttcctgccctaaaggttgagtcccaggccagggaaaattcacaataagctgacttaacccttgagctttaaggaaatatcagtggtgtctggcagaatgcttgatgggactgtggtgggagaggcttctctgcctttgggaaaaaaagggaagagtgggaagcactgtgtcttgtggtttgagtgccaccttaggtgcagtacaatagaacaccaggtagacttctaagctttttgcctctagaccccaactccaaggtggcatctctggacccaccttaggcctggggaaagtcaccacctttaatggaagaacagatgcctggctgactctgccacctgctgattgtataaccccagaaccttgagcaaacaaaggcagtacacaggaaatggatacaggtggccttgggggagaaccagtgttgtgctggcttcaggtctgactcagtgcagtcatagtgatggtggcttgtgtcattccatctccagctttagacggctcagaacagggagacatactctgttaggaagaaagggaagagaataggagtctctgcctggtaatccagagaatcctgctgaatcttgtataagaccattaaagcaatatctctatgagtctgcaagaactacagcattactggcttggaatgcccccataaaacagataaagtttagatcataacacccaagtcctttcaaatattttgaaaacctgcccaataaggaagggtacaaacaattccagactgagaagactacaatgaatacataactcttcaatactcagacacagagaaacctctgcaggtatcaaggcattccaggaaagcatgacatcaccaaatgaactaaataagtcaccaggaatgaatactggagaaacagagatatgtgaccttttagacacaggattcataatggcctttttaaggacactcaaataaattcaagataacacaaagaaggaattaagaattctatcagaaaaatttaacagagattaaaataatttgaaagaatcaagcagaagttctggagctgaaaaatgcaattggcacactgaagaatgtactagagtcctttagtagcagaattgatcaagcagaaagaagaattagtgagcctgaagacaatttatttgaaaacacacaggggagaaaaaaggaaaaaagaatgaacaataaagcacacctacaggaaggaaagaaagaagaatacaccacaaaaaaaccagaaaacacatttaaaaaatggcagaagtaagtccttacttatcaataataacattgaatgtaagtggattaaatcctttaatcaaaagacatagactgaatgaaaaaaaagactgaatgaatgaaaaaacaagacccattgatctgttgccatcaagaaatacatttcacccatcaagacacacatagactaaaaataaagggatggaaaaagatatttcatagctaaaaaaaagaacatgagtagctataattatcttagataaaatagattttgagacaaaactataagagaaaaatgtcactatacaataataaagtggcaaattcaacaagagaatataacaactttaaatatatatgtacccaacattagagaacctatatgtataaagaaaatattattagagctaaagagagatgggccccaatacaataatagctggagatttcaacactccactttcagcattgaacagatcttccagatacaaaatcaacaaagaaacgtcatactcagtcttcactaaagaccaaatgggtctaatagatatttacagaacatttcattcagtggctgcagaatacacattttttctcagcacatgaattattctcaaaaaacaggccatatgttaggtcacaaaacaaggtttaaaactcacaatgaaataaaattagaaattgataacaagaggaattttggaaactgtacaaatacatggatataaaccaatgcattcctgaatgtccagtgaatcaataaagaaatcaagaaagaaactaaaaaatgtcttgaaacagatgataatggaaacacaacatcctaaacctatgatcagggatacagcaaaagcaatattaagactctgtcttttgtaaatagcccagtcttgagtatgtttttattagcagaatgaaaatggactaatacagtgaattgctgctggtagagtggggcattgctaaaaaggtacccaaaaatgtagaagcaaatttggaacttggtaacaggaagaggttggaacagtttggatggctcagaagaagactggaaaatgtgggaaagtttggaacttcctacagacttgttgaatggctttgcccaaaatgctgatagtgatatggacaataaaatccaggctgaggtggtcccagatgaacaagaggaatttgttggaaactggagcaaaagtgactcatgttacagcaaagagactggtggcattttgctcctaccctagagatttgagaaactttgaacttgagagaaatgattttgggtatctggtagaagaaatgtctaagcagaaaagcatttaagaggtgacttgggtgctgttaaaggcattcagctttgtaagggaagcagagcatataagttcagaaaatttacagcctgacaatgtgatagaaaaaaaaagtcctattttctgaggcgaaattcaagccagctgcagatatttgcataagtaatgagaatctgaacgttaattcccaagacaatggggaaaatgtctccagggcatatcagaggtcttcacagcagccctggaagccaaggaagaaaagatgacttcatggaccaggctaagagtcccagtgctgggtgcagtctagggacttggtgccctgcatcccagctgctccagctgtgactaaaaggggccaagctacagttcaggccatggctttagagggttgaagccccatctattggcagcttgcacatggtgttgagtctgtgggtgcacaggagtcgagaattaaggtttggaaacctccacctatatttcaggagatgtatggaaatgcctggatgcccaggcaaaagtttgctgcagggatggggtgctcatgggggacctctgctagggcagagcagaagggaaatgtggggatgaagccccccacacagagtccccattggggcactgcctagtggagctgtgagaagaggtccaacatccttcagaccccagaatggtagatccacctacagtttggtagaccaagcagaagaaaagatatcagagcttgaatactaccttgatgagataaggcaggcagagaagattagaggaaaaagaaagaaaaggagcaaacaaaactgctgagaactatcagattatgttacaggatggaacctacaactaataggggtacctaaaagagatggagaaaacagaaccaagttggaaacacactttagagtcatccaggagaacttccccaacctagcaagacaggccaacattcaaattcaggaaatccagagaacctcagtaagatacaccatgagaaaatcaatctcaagacacacaatcatcagattctctaaggtcaaaatgggaaaaaaaaaaaaaaaaaagcagttacgtgcagccagagagaaaggccaggtcacttataaatggaaccccatcagactaacagcaaaattcccacaagccaaaagggattggaggccaatattcaacattcttaaagaaaagaatttccagcctagaatttcatgtctggtctaagtttcataagcaaaggagaaataaaatcttttttagacaagcaaatgctgaggaaatttattaacaccaggactgcctggctcctgaaggaagcattaaatatggaaaagaaaaatctttaccagccactacaacaacacactgaggtacacaaactaatgatactatgaagcaactacagaaacaagtctgcaaaataaccagctagcatcatgacgacaggttccaactcacacataacaatatttaccttaaatgtaaatcggcaaaatgccccaattaaaagacacagaatgacaagctggataaagagttaagatccattggtgtgctgtattcaagagacccatctcaaatgcaaacacacacatagactcaaaataaaagaatggaggaaaatttaccaagcaaatggaaaacagaaaaaagcaggggttgatatcctagtttatgacaaaatagacattaaaccaacaaagatcaaaaaagacaaagaaaagaattatataataaaacaggtgtcaatttaacaagaaaagctaactatcataaatatatatgcctccaatacaggagcacccagattcacaaaacaagttcttagagacctacaaagagatttagactcccacacaataatagtgggtgactttaacaccccactgacaatattatacagaaaattaacaatgatattcaggacttgaactcagctctggaaccagtggacctgatagatatctacagaactctccaccccaaaacaacagaatatacattatttttggtgccacatggcacttattctaaaattggttacataattaacagtaaatcattcctcagccaatgaaaaagaactaaaatcataacagtctctcagaccacagtgcaatcaaattagaactcaagattaagaaactcactcaaaaccacacaactacatggaaattgaacaaactgcttttgaatgacttctgggtaaataatgaaattaaggcagaaatcaagaagttctttgaaaccaatgagaacaaagagacaatgtaccagaatctctgggatgcaactaaggcagtgttaagaggaaatattatagtactaaatgcctatatcaaaaagctagaaagatctcaaatcaaaactctaacataacaactaaaaccaagagcaaaaaaaaacacctcaaagctagcagaagacaagaaataaccaagctcagagcataactgaatcagatagagacatgaaaaacccttcaaaagaaatcaatgaatacagaagctgtttttttgaaaaaaaaaaaaagacatagactgctagctagactaataaagaagaaaagagaagaatcaaataaacacaataaaaactgataaagggaacattgccactgatccacagaaatacaaacaatcctcacagaatactataaacacctctatgcaaataagctagaaaatctagaagaaatttataaattcctggacatatacaacctcccaagactgaaccaggaagaagtcgaatccctgaatagaccaataacatgttctgaaattgaggcagtaataaataacctatgaaccaaaaaaagcccaggatcagatggatttacagccgaattttaccagaagtacaaagaggacctgacaccctttcttctgaaactattccaaataattgaaaaggagagactcctccctaactgttctatgaggccagaatcatcctgataccaaaacctggcagagacaaaacaaaaatagaaaacttcaggccagtatccctaatgaacactgatgcaaaaattctcaataaaacactggtaaagcaaataaagcagtacatcaaaaagcttatccaacatcatcaagttggcttcatcattgggatgcaagactggttcagcatatgcaaatcaataaaaaaaattcatcacataaacagatctaaagacaaaaaccacatgattatctcaatagatgcacaaaaagcctttggtaaaattcaacatcccttcatgttaaaaactctcaataaactaggtattaaaggaacatacctcaaaataatgagtcatttattacaaacccacagccaatatcatactgaatgggcaaaacctggaagcattccccttggaaatcagcacaagacaagtatgccctctctcactactccttttcaacacaatattggaagttctcaccagggcaatcgggcaacagaaagaaataaaagtattcaaataggaagagaggaagtcaaactgtctctgtttgcagatgacataatcctatatctagaaaaccccatcatctcaggccaaaagcttcttaagctgataagcaatgccagcaaagtctcaggatacaaaatcaatgtgcaaaagcacaagcatttctatacaccaacaacaggcaagcagagagccaaatcatgaatgaacttccattcacaattgctacaaagagaataaaatacctaggaataaagctaacaagggaattgaaggccctcctcaagaagaactacaaatgactgctcaaggaaatcagaaaggacacaagcagatggaaaagcattccatgctcatggatagaagaatcaatatcatggaaatggccatagtacccaaaataatttatagattcaatgctattcccattaaactaccattgatattcttcagagaattcttagaaattcttagaaaaagctattttaaaattcatatggaaccagaaaagagttcatatagccaagaaaatcctaagcaaaaggaacaaagctggaggcatcatgctaccagacttcaaactatactacaaggctacagtaaccaaaacggcatgatattggtacaaaaacagatatataaaccaatgtgaaataatagagaactcagaagtaagaccacacatatacaaccacctgatcttcaacaaccccaacaaaaacaagcaatggggaaaggattccctatttaataaatggtgctgggagaactggctagccgtatgaataaaattgaaactgtaccccttccttacaccttatacaaaaattaacttaagatgggttaaatatttaaatataaaacccaaagctataaaagcactacaagaaaatctaggcaataccattcaggacataggcacaggcaaagatttcatgacaaaatcgccaaaagcaattgtgacaaaagcaaaagttgacaaatgggatctaattaaactaaaagagcttctgcacagcaaatgaaactatcatctgagtgaacaagcaacctaaaaaatgagagaaaatttttgaaatctatcaatctggcaaaggtctaattccagaatctacaaggaacttaaacaaatttacaaaaaacaaaaaaaacaaccccatcaaaaagtgggcaaaggacatgaacagaagcttctcaaaataagacattcctgcagccaacaaacatatgaaaaaaggctcaacatcactgatcattagagaagtgcaagtcaaaatacaataatataccatctcacaccaaatagattggcaattattaaaaagtcaagaaaccacagatactggcaaggttgtagagaaatagtgcagacataatctgcactgtagaccaaatgcatccaatagatatttacaaaacattttatctaagagctacagaatacataattttttcctcagcatataaatcaatctccagaatagaccataggttaagtcacaaaacaaatcttaaaacatttgaaataatatcaaacatcttctctaaccacaatgaaataaaattagaaaataataggaatgcttttacactgttggtggaaatgtaagttagttcaaccattatgaaagactgtgcagggattcctcaaagatctagaaccagaaataccatttgacccaccaatcccattactgggtatgtaaccccaaattataaatcattctattacaaagatacatgcacacgtatattgattgcagcactattcacaatagcagggacatggaataacccaaatgcccaacaatgctagactggatttaaaaaatatggtacatatacaccatggagtattatgcagccataaaaggaatgagatcatgttctctgcaagggcatggatgaagctggaagccattatcctcagcaaagtaacacaggaaaagaaaatcaaatgccacatattcccactcataagtgggagctgaaagatgagaacacatggacacagggaggggaataacacacacttggggggcctgtcatgtggtggggtggggggaaggagagcattagaaaaaattgttaatgcatgctgggcttaatacctaggtgatgggttgacagatgcagcaagccaccatggcacacatttacctatgtaacaaacctgcatattctgcacatgtacccccagaacttaaaataaaaataaaatttgtttaaaaaaagatcattacagtcacatctggggtatcttttctggagaacaaagaataaaattgtgataacaataaattatcaaatagcatctgaggttgaaaactgaaaatataaaaaagaaacaaatgcaaattatgaagttgaaaagtacaataactgaaatgaaaaactgactagcatgaatcaagagtacatttgagatgatagcaaaaggaataagtaaaattaaaagtagatcaatataaatcatttaatctgagtttaaagagtttgggaggagaactaaaagaagaaacagatcttcagccacacggtacttacgggtatcaatttcaagatcccccatagatacaaaaatccatggatgcctaatacaatctaaatgctatgtaaatagttgttaaactctattgtttagggaatggtgaccaaaaaatgtctgtatatgttcaatacagacacaaacgtccttttttcccaaaaattcttgatccagttaattgattcgtggatgtggaactcacagattcagtgggccaactatatgtacaatagaatattattcagcaccccccaaaaaaaattttgccatttgcaacaacatggatgagcctacaggacattatgcgaagtgaaataagccagacacaaaaagaaaaatactgcataatctcatttacatttgaaatccaaagctgaactcatagaaacatagagtaaaaaactgattgcaaggagctggtcaatggcagaaataaagatattttggacagaggttacaaaatttggttataagatgaataagttctggagatctaaagtaaatcattgtaactatagttaatattaatgtattgtatacttgaaattgcttaaaaaatagatcttacatgttctcacaatgaaaaacaatatttatataaggtgatgaatatgttaattgtggtaatcacattacaatgtatacatatatcaaaatgtcacattattatacaaggctaaatatacacaatctttatttgtcaataatgactatattatatatattaaagtaactaggaatataaagactcattatgataaatggtatatacaaaagcccttcagctaatattatacttaatagtaaaacattgaatgctttcttcttaatggcgggaacaaacaaatgatttccactactacttcctctattcaataatatactggcagttacagccgattcaataaggcaaaataagaaaaaaagaaaaagaaaaaaattaaaccttctataatgaaaataaagaagtaaacctgtctttatttgctgatgacataatcctgtttgtgaaaattcctgaggaatacacaaaaactgccagaactaataagttcagaaggtggcagaatacacacaatatacaaaactttactctattttctatactagtaaaaaaaaaaaaaaaaaaaatctgggccaggcattgtggctcacacctgtaatctcagcactttagcaggaggctgagggaggaggatcatttgatgtcagaagtctgagatctgctggagcaacaaagtgacaccccatctctacaaaaaaattttaaaagttagccaggcatagtggaatgtacctgtagccccagctactcaggaagctgagtttagaaaaatgcttgcactcaggagttggaggctgcagtgagccataattgtgccactgcacttttgtgcactgcctgcatcctaacacccccttactgcaaatgctagcaaagaggccagcacccttgcaattgccaacaccccaccacagccagtgagcgcatgctttgctgtactgccattgatgctggtatgtgtgaatgaggatggattttgctgtcaccactctacaaactgttctttgtctggcaacacccaccagagtgttgtgaccagcagtccaggaataccttgcccctccagtgcagcaggttcctaaccctgaggggccagaggacaaagccagggacccaataccagtcctccagagttagaggacatggtccagaagtcttgagcagagtcttggcccccaaaaatcttccagaaatgaagccagtttactgaatccacctcacactacaatcaaacccccaaggacatctaataaaataaaatgagaagaaaaccatccaaaggatagctacatcaaagcttcaaagaacatcagcccacaaagatgaggaagaaccagcacaagaactctggcaactcaaaaatccagagtgtcttcttacctccaaatgataacactagtttcctaacaatggttcttaatcaggctgagatggctgaaatgatagaaatagaattcagaatatggacagaaacaaagatcattgacatacaggagaaagtgaaaacccaatccaaggaatctaaggattacaataaaacaatataggaggtgatagataaaatggtcattaaaagagagaaccacactgatctgacagagctgaaaaacacactacaagaatttcataatgcaatcacaagtattaacagcagaattgaccaaactgaggaaagaatatcagggcttgaagactctctctaaaacaactcagtcagagaaaaattttaaaaaaaataaagaatgaacaaaagctctgagaaatatgccattatgaaaagaaacacattctacgattcactggcgtttgtgaaagaaaggaagagaaattaaccagcttggaaaacatttttcaggatattgtccataaaaatttccccaaccacactagagaagccaatattcaaattcagaaaatttagagaatccctgtgaaatactaaacaagaagaccatccccaagacatatagtcatcagattctccaaggtcaaaatgaaagaaaacctgacaagaaagctagagagaaagtgcaggctgcctactgatatggtttggctgtgttcccacccaaatctcatcttgaattgtactcctataatccctatatgttgtgggagggacctggtgggagataattgaatcacgaaggcaggttttcccatgctgtcctcaagacagtgaataagtctcacgagatctgatggttttataaatggcagttccctggcacatgctgtcttgcctgctgccatgtaagatgtgtcttttctcctccttcaccttctgccataattgtgaggtctccccagccatgtggaactgtgagtccattaaaccatttttttaataaattatccagtcttgggcatttcttcataacagtatgaaaatggactaatacatctacaaatagaaccctaccaggctaacagcagacccgttagcagaaaccctacaagccagaagagatgggggttctatattcagtattctttttttttttttttttaatttatttttttattgataattcttgggtgtttctcacagagggggatttggcagggtcatgggacaatagtggagggaaggtcagcagataaacaagtgaacaaaggtctctggttttcctaggcagaggaccctgcggccctccgcagtgtttgtgtccctgattacttgagattagggattggtgatgactcttcacgagcatgctgccttcaagcatctgtttaacaaagcacatcttgcaccgcccttaatccatttaaccctgagtggacacagcacatgtttcagagagcacagggttgggggtaaggtcacagatcaacaggatcccaaggcagaggaatttttcttagtgcagaacaaaatgaaaagtctcccatgtctacttctttctacacagacacggcaaccatccgatttctcaatcttttccccacctttcccgcctttctattccacaaagccgccattgtcatcctggcccgttctcaatgagctgttgggcacacctcccagacggggtggtggccgggcagaggggctcctcacttcccagtaggggcggccgggcagaggcgcccctcacctcccggacggggcggctggccgggcgggggggctgtccccccccacctccctcccggacggggcggctggccgggcggggggctgacacccccacctccctcccggacggggtggctgccgggcggagatgctcctcacttcccagatggggtggctgccgggcggagaggctcctcacttctcagacggggcagctgccgggcggaggggctcctcacttctcagacggggtggttgccaggcagagggtctcctcacttctcagacggggcggccgggcagagacgctcctcacctcccagacggggtctcggccgggcagaggcactcctcacatcccagatggggcggcggggcagaggcgctccccacatctcagacgatgggcggccgggcagagacgctcctcacttcctagatgtgatggcggctgggaagaggcgctcctcacttcctagatgggatggcggccgggcggagacgctcctcactttccagactgggcagccaggcagaggggctcctcacatcccagacgatgggcggccaggcagagacgctcctcacttcccagacggggtggcggccgggcagaggctgcaatctcggcactttgggaggccaaggcaggcggctgggaggtgtaggttgtagtgagccgagatcacgccactgcactccagcctgggcaccattgagcactgagtgaacgagaccccgtctgcaatcccggcacctcgggaggctgaggttggcgggatcactcgcggttaggggctggagaccggcccggccaacacagcgaaaccccgtctccaccaaaaccagtcaggcgtggcagcgcgtgcctgcaatggcaggcactcggcaggctgaggcaggagaatcaggcagggaggttgcagtgagccgagatggcagcagtacagtccagcttcggctccgcatgagagggagaccgtggggagagggagacagagggagagggagagggagagccggaaaagtttcttgtatagccccggctcttagagccaggctcttcacccttattttcataaagctgcgatgcatgcttcatacataattgtgcatgttgctgcctccttctcccagctgcccgacgtgtcatctattcagtattcttaaagaaaagaattttcagccaagaattttatatctagccaaagtaaacttcataagcaaataagagccttttcagacaagcaagtgctaagggaattcattaacaccaaatgcgttacaaaagatcctgaagggagtgctaaatataggcaggaaagactgctgccagccagtacaaaaacatacttaagtacatggacctgtaatgctataaagctaccacataaccaagtctgaataataaacagctaataacgtgatgacaggatgaaatccatacatgtaagtactaaccttgaatgtaaacaagataaatgccctcaaaagacagagtgacaagttggataaagaagcaaaactgtcttcaagggactcatgtgcaatgaaacccataggcccaaaacaaagggatggagaaaaatctaccaagcaaatggaaaccagaaaaaaaaagggggttgctatttgaattttggacaaaacagattttaaactaaaaaagatcaataaagacaaggaagagcattacataatagtaaaggacttaattcaacaagaaaacttaactatcctaaatatatatgcacctaacacaggagcacctggatttataaagcaagttgttaaaaaccaatgaagacatttaaataaccacataataatagtgggaaacacttaagaccccagtgacagttttaaatcatcaaagcagaaaactaagaaaggtatttgggaccttaattcaacacttgaacaaagggacctatagacatctacagaactctccatccaaaaacaacagaatatacattcttctcatctgcacatggcacatactttaaaatcaataacacaatcagccataaaaaatcttcaccaaattttaaaaaacagaaattataccaaccacatactcagaccacagcacaataaaaatagaaataaatgagaagaaagtcactcaaaaccatagaagtgcatggaaattaaatgacttcatcccaaatgacttctgggtaagtaataaaattaaggcagaaataaagaaattatttgaaactaatgaggaaaaagatacaacataccagaatctgtgggatacagccaatgcagtgttaagaggaaattttatagcactaaatgtccacatcaaaaagttggaaagatctcaaattaccaacctaatatcacaacacatcagaactagggaagcaagagcaaatccaccccgaagctagcagaagaaaagaaattagaaaattagagctgagctaaaggaaattgatgtaaaacacacacacacaccacacacacacacacacaaacacacacacacacacaaaagacaaagaatccaggaactggttctttgaaaaaaaataagatagatagaccactagctagtctaataaagaaaaaaagagagaatatccaaataaacccatcagaaatgataaatggaatgttaccattaccccacataaatacaaatgccctcagagactattatggacacttctatacacagaagctagaaagcctaaaagaaatggatagattactgtaaacatacaacctcccaagattgaaccaggaagagattgaatccttaaacagacaaacaatgaattgtgaaattgaatcagtaataaaaagcccaccaatcaagaacagatgaatccatagacaaaatctaccaaatggataaggaagagctggtaccatttctaccaaaatgattccaaaagattgaggaggagaacctcctccttaactcattctatgaggcgagcatcatcctgataacaaaacctggcagagacacaatgaaaaaagtcaacttcaggtcaatatacttaatgaacatcagtgtaaaaattctcaacaaattatttgcaaggtgaatctagcagcacatcaaaaatctaatccaccatgattaagtatgctttatccctgggatgcaagtttgattcaacatatgcaaatcaagaaatgtgattcaccacataaactgtactaaaaacaaaaaccacataattaacacaacaaatgtagaaaaggctttcaataaaatttaacatctctttatgttgcaaaccctaaacaaactaggcattaaaggaacataattcaaaataaagaggcatctatgaaaaactcacatccaacatcatactgtatcaacaaaagctgtaagcattttccttgaaaactagaacaagacaaggatgccctctctcaccacttctattaaacatagtgttggaagtcctaaccagagcaatcaggtaagagaaagaaataaaaggcatccaaatgggaagagaggaagtcaaaatatctctgtttgcagatgacatgattctatacctagaaaacctaatagtctctgcccaaaagctccttgatttgatacacaacttcagtatagtttcaggatacaaaatcaatgtacaaaaattactagcattcctatacaccaacagcatccaagctgagagacaaatcaagaacacaatcccattcacaatagccacaaaaagaatgaaatacctaagaatacagctaactaggaagctgaaaaacctatacaatgagaattacaaaacactgctcaaagaagtcagaatgccaaaaagaaatggaaaaacattccacgttcatgaataggacaaatcaatattgttgaaatggccatactgcccaaaccaatttacagattgaatgctattcatgttaaactacaaatgacattctttacagaactagaaaaaactattttaaaatttatatgaaattgagggcccagggcccagatgggccagaagtggccagatgcaggcagggtgggcacctggacacctgccttgggtgccttgctgcccagatggtggcagtggtggccacacatgcggcccagcttctgtcctcacgttcctccagctcccagcccccacaccatgtcaccgcctgtgctgcccaccgagttggtgccttcagagtgcattgtggtgctgctgtcctgtgcattctttgtgctcagctcaggcctgctggtggccatgtgcaccctgtggcccgacctgtgaagccaggcacagtgcctgctgctcttcctgtcactggccaacctgctctcagctgcctcctacttctatgggatgctgcaggacttcgcaggctgtcatggaactgcatgctgcaaggtgtgctgtccaccctcaccaacaccagctcattcttctggactgtggccatcatactatacctgtacctcaggatcactagcaccgtgcaggccctgcaccaaccatctgctctgagccttccatgtcatcaggtgatcttgactttccagagttcagctgttctgagattgaagtcaggggtggagggctggtctgggggtctgggagtccacctggagtctctctgagagtgaggaaaaaccaagaccttacccagcagttcaagcatctttcaagtaagcctcactgaagagggtcagcccttccctggggaatgtcaggttttgagaatctcatggcattatgtgctgaactgtgggcaagaatcctagggctgttttccttttctccttctcccagatcagagcatcagatactgccctaattataggtcctttctgttaaaaatgtaagtgctttccaagtgagagatgaggccggctggacttcctgggtccagcggggactttggggaactttcctgtcttacaagaggatttgtaaactcaccaatcagtgctctgtaaaacataccaatcagcaggattctaaaagcagccagtcaaagggaggattgaaaaaagggcactctgacaggatagaaacagaacatggaaggggacaataagggaacaaaaactggccaccccagccagcagcagcaacccacttgtgtccccttccacactgtggaaaccgttcttttgctcttcacaataaatcttgctactgttcactctttgggtccttgccatctttaagagctgtaacactcaccatgaaggtctgcagcttcattcttgaaatcagcaagaccacaaacccacttgcaggaacgaaccccagacacatcttgggggctcatccaggatatcaccacgtggtgagtaccattggacccctttcacttgctattctgtcctatttttccttagaatttgggggctaaacaccaggcacctgtcagccagtcaaaagcaaatggcacagctgctggactacagacacaggtgtcagactttttgggaaagggctctctaacaacccccaactcttcggagtcaggagtgttcatttgcctggaaccagcttctgctttccctgcacttctgggctgagctgagggtcaacagagaggaaaactaatcagctccagggtcccaacaaaaacttggttgaccctgcagctatgagcagagctctcaaacttatgttgcccaagcgagactcacccatctgtcctgtctatcctgacacttgtctcctgggtcctaatgcctgtcagacaaactttctctcacctctcttctccaaggctagtcctgcttctaaaaatcactccctatccctggtgcttttctagtttctcctataaggatgatttctaatatagattttgggactctgttcccttcttcaggcacccaggcttacaaatcagaaagagccgaattcttcaacaggaaataggtgccctggggcacataatttttgcccagagccctgttgcaggtggaactatctggaattttaggatccctcctcaggctagcaggcctaacaaaggctattcttgaagctaggatatggggagtctcagaaattatagactgcaaaattgggggaatatccttcctattcatatgatgagaagtgaggacaaaaggcatcacttttccaatcctggagatccctttcctccctcaaggtatggccctccactccattttgaggcatatcatctttataggacaaggttaagttcccaataccaacaggagaaaatgcttaggactctaacaggttttcaagaatgcatcagtaagggccactaaatctgacctttcttggccctctttgttgtctaggaggaaaataagtgtttccactgctgctttggtgagcacaactattctgaatagtagggtccagggaccattgcaggttctggggtgggaaaaaacagatcaaaactgcaggcggttttttgttctgttttagatgggaaacactcaggcatcaacgagctcacccttgaaatgcatcctaagccattgggaccaatttgacccacaaaccctgaaaaagaagcagcttatttttttctgcactatagcctggctccaatattctctccctgatggggaaaaatggccacctgagggaagtataaattataatactatcctgcatcttgaccttttctgtaagagggaaggcaaatgttgtgaaataccttatgtccaagctttctttttattgaaggataatccacaactatgcaaagcttacaatctatatcccacaggaagacctctcagcttatccccatattctagccttcctacagctccccttcctattagtggtgagcctcctctaatctcccccactgagatggaaacaagcaaagaaatatccatgggaccataaaacccccaggctattggttatgtccccttcaagctgaaaggggaggggaatttggcccaacccaggtacatgacccctcctccctctctgatttaaagcaaatcaaggtagacctggggaagttttcagataccctgataggtacacatatgtcctacggggtctagggcaaaccttcaacctcacttggagagctgtcatgctattgttagaacaaaccctggcttttaatgaaaagaatgtggctttagctgcagcccaagagtttggagatacatggtatcttagtcaggttaatgatagaatgacagctgaagaaagggacaaattctctactgatcagcaagccatagccagtatggatccccactgggacctccactcaggtcatggggactagggttgcaaatatctgttgacctgtgtcaatgaagaagacttaggaaaaagcccatgaattattcaatgatgtccaccataactcagggaaaggaagaaaatcctaccaccttccttgagtggctacaggaggccttaagacaatataccctcctgtcacttgattccctcaagggtcagttgatcctaaaggataactttattacccaatcagctgcagatatcaggagaaagctcctaaagctagccctgggtcctgaacaaaatttagaggcattattaaacctagaaatctcagtgttctataaaagggaccaagaggagcaggccaaaaaggaaaagtgagataagagaaaggccacagccttagtcatggccctcagacaaacaaaccttggtagttcagagaggacaggaaatggagcaggccaatcacctggcagggcttgttatcagcgtgggttgcaaggacactttaaaaaagattgtccagtgagaaacaagccacccccttgcccatgtccactatgccaaggcaatcattggaaggtgcactgccccagaggacaaaggctctctgggccagaagcccccaatcagatgatccaacaacaggactgagggtgcctggggcaagtgccagctcatgtcatcaccctcagtgagacccaggtaagtttaaccactgaaggccaggaaattcacttcctcctggacactagcgtggccttctcagtgttaatctcctgccctggacggctttcttcaaggtccattaccatccaaggaatcctgggacagcctgtaaacaggtagttctcccaccttctcagttgtaattgggagaatttgcccttttcacgtgcctttcttgttatgcctggaagtgccacacccttattagggaggaacatattagccattgctattatctacatgaatatgggggacaagttacccatttgttgtcccctacttgaggagggaatcaaccctgaagtctgggcattggaaggacaattcagaagggcaaaaaatgcccacccagttcaaatctagctaaaagaccccatcacttttccttatcaaaggcaatatcccttaaggcctgaagctcgtaaaggattaaaggatactgttagacatttaaaagctcaagtcttagtaagaaaattcagcagtccctgcaacaccccaattctaggaatacaaaaacaaaatggtcggtggagactagtgcaagatcttagactcatcaatgaggcagtaattcctctatatccacctgtagccaacccctatacactgctctctcaaataccagagtcagcagaatggttcactgttctgatcctcaaggatgccttctgtattctcctgcactctgactcccagtttctctttgcctttgaggatcccacagaccacacgtcccaacttacatggacagtcttgcctcaagattttagggatagccctcatctctttggtcaggcactggcccaaaatctaggccacttctcaagcccaggcactctggtccttcagtatgtggatgatttacttttggctaccagtttggaagcctcatgccagcaggctactctagatctcttgaactttgaagctaatcaaaggtacaaggtgtgtaaatcaaaggcccagctctgcctacaacaagtcaaatatctaggtctagtcttagccagagaaccagggccctcagcaaagaatgaatacagcctatactgacttgtcctcaccctaagacattaaaacagtcacgggggttccttgggatcaccagtttttgccaactatggatccccagatacagcgagatggccaggccactctatactcaatcaaggagacccagagggcaaatactcatctagtataatgggaaccagaggcagaaacagctttcaaaaccttaaagcaggccctagtaccagctccagccttaagccttcccacaggacaaaacttctctttatacatcacaaagagagtgggaatagctcttggagtccttactcagactcaagggacaaccccacaaccagtggcatacttaagtaaggaaattgatgtagtagcaaaaggctggcctcattgtttatggtagttgtggcagtggtcatgttagtatcagaggctatcaaaataatacaaggaaaggatctcattgtctggacagctcgtgatgtaaatggcatactaggtgccaaaggaagtctatggctatcagacaactgtctgcttagataccaggcactactccctgaggaactggtgcttcaaatatgcatgtgtgtggccctcaaccctgccacttttctcccagaggatggggaaccaatcaagcatgactgccaacaaattgtagcccagacttttgctgttcaagaggatctcttagaggtccccttagctaatcctgaccttgccctatatatcgaaggaagttcatttatggagaatgggatatgaagggcaagttatgccatagttagtgatgtaacagtacttgaaactaagcctcttcccctagggaccagcacccagttagcagaactagtggtgcttacctgagccttagaactgggaaaggaaaaaagaataaatgtatatacagtatttgtccatttcatctaataaataatctaatttgtttaatggcaaaaaatgtatatacagttagcaagtatgcttatctaattctacatgcttatgctgcaatatggaaagaaagggagttcctaacctctaggggaacccccattaaataccacaaggaaatcatggagttattgcatgcagtgcaaaaacccaaggaggtggcagtcttacactgctaaagccatcaaaaagatgaaggagaaaaggcagaaagaaactgtcgggcagaagctgagaccaaaattgctgccaggtggaacctcccattagaaatacctatggaaggaccctcggtatggaacaaccctctccaagaaattaagccccagtattcccgtccaaaacagaatggggactttcatgggggcatagttttctcccctcggggtggttaatgacagaagagggaaaagtactcatacccgaagccagccagtgggaaatacttaagaccctctgctaaaccttttatatgggtattgagaacattcatcaaatggccaaatccctatttacacagtcaattctccccagaccatccggcaagtagtcaaagcctatgaggtgtgccaaaggaataatccattggtccatcataaggctcccctcggggaaacaaagaacaggtcactatcctggagaggattggcagttagacttcatccatatgcctaaatcaaggggatttcaatacttggtatgtgttgatacctttacaaattggatggaagccttcccttgcaagagagagaaagctcaggaagtggttagtcctaattcatgaaataattcctagatttgggcttccccaaaacttacaaagtgacaatggtccggcttttaaagccatgataactcagggaatttccagggcactagggatacaatatcaccttcagtgcacgtggaggccacaaacctcagggaaggttgagaaagcaaatgaaacactcaagaggcacttaaggaaactaacacaagaaactcatctcccatggcctactttcttgcccatggccttgttgagaatctaaaattcccctcacaaaatggggctcagtccatatgaaatgctgtatggatgaccttttctcacaaatgacctcttacttgatcaggaaatggccaacttggtcaaagacataacttctttggaaaaataccaacaaaacattaaaaacctacctgaaggacatcacagagaaaagggaacagagttgttccaactgggagatctagtgttggtcaagtcccttccctctaccttcccatctatgaattccttgtgggaaggaccatactcagtaatcctctctactcccactgcagttaaggtagcaggaggggaatcttggattcaccacacccgagttaaactttggacaccccctgaggaacctgcaggaccatcagatcaggagtcccaagatcagccagaccagcctcaatacacctgtgaaccattggaggacttgcgtctcctatttcagaaggaaacatcccaaactaaaaaggctccttcagctgatcctgaggaaaaaccccttcctacttaaaaaagttaagtgaaaacctacataatctttaacacctctccttgcccctttaatggaatccttttactgtttcatcacattattaggcagtatactaaacatactctttgcagtaggattatatactgtagcttctgccgggatgaaaatcctaatcacatcaaccttttttctatcatccttcgttctgatggcaatttaatcctacctttaactcagactggataaaaagacctcatcttccagggaaccctctttacctttctacttacactttgtctatataaccctcctgcttccttggataccccacatagtcacccctccccttccactggctcctaattacctctacaagactctcaacttaacccactctctgttaaaccagtccaatccttccctggcaaatgactgtcggctttgtatctctctatcagccactgcttatgttgccactctcgttcccacaaaaaactgggtctttattaacttaacctaccactcccattatgaaggaagagaccctttccaacttctaaatatgcaatcattagctgacttccccatctctgataggaacaaagcagggcacacaatccagcgtttacactcttacatttccaacctcacctattgctcctcacaggagcagtgaaaagcacatacacagccctgtaaccaggaataccatctaattttccaagcccctttatgcatccaactcaacctgttatcaggcctgcccctggggcacctattatcccatcagtgtaattacaccctacaacttcaagccccaactgatcatagtaacttccgagtcacccaaacagctccattcagatggcttttctgcttctcaggatccccaaaaatcatcaccttctccctgcttaacaaacagtctgggttttgtaatggcaaacacattccctgcatgaccattctcctctggaccccctgcagcagtgtccccaacactagcaaatgccttctcatcccctctttcaattactctcttgaatggttcctagtagatacaaaatgattttatctccagtgggaaaatggaacacagggagccactcagtttcctcccaacacccatttccagccgctcaccaaagctaccttcgcgagtactctaagagtatgggaaaatgaaaacaacaaattcacacacctttttaacatacacaaccagttctgtctacccagccaaggcatattcttcttatatggaacttcaacctatatctatctgcctccccaccaaacggacaggcacctgcaccttagtcttcctaagtcccaccattgacatcgccccaggaaatcagaccctatcagtgcccctcaaggctcaagaccatcagtgcagggccataaaactaatacccctacttatagggttaggaatggcccctgctacaggaaccagaatagccagtttatctacttcactatcctattaccacgcactctcaaaggatttctctgacagtgtgcaagaaataatgaaatctatcctcactctacagtcccaaatagaccctttggcaacagtgactctccaaaactgccgaggcctagacctcctcactgctgagaaaggaggactttgcaccttcttaggggaaaagtgttgtttttacactaacaattcagggatagtatgagacgccacctggcatttgcaggaaaagtcttctgaaatcagacaacacctttcaaacttttataccaacctctggagttgggcaacatggcttctcccctttctaggtcctgtgagagccatcttgctattacttgccttcaggccctgtatttttatttttttattttttttttttaattttttttttttattatactctaagttttagggtacatgtgcacattgtgcaggttagttacatatgtatacatgtgccatgctggtgcgctgcacccactaacgtgtcatctagcattaggtatatctcccaatgctatccctcccccctcccccgaccccaccacagtccccagagtgtgatattccccttcctgtgtccatgtgatctcattgttcaattcccacctatgagtgagaatatgcggtgtttggttttttgttcttgcgatagtttactgagaatgatggtttccaatttcatccatgtccctacaaaggacatgaactcatcattttttatggctgcatagtattccatggtgtatatgtgccacattttcttaatccagtctatcattgttggacatttgggttggttccaagtctttgctattgtgaatagtgccgcaataaacatacgtgtgcatgtgtctttatagcagcatgatttatagtcctttgggtatatacccagtaatgggatggctgggtcaaatggtatttctagttctagatccctgaggaatcgccacactgacttccacaatggttgaactagtttacagtcccaccaacagtgtaaaagtgttcctatttctccacatcctctccagcacctgttgtttcctgactttttaatgattgccattctaaccggtgtgagatgatatctcatagtggttttgatttgcatttctctgatcaggccctgtatttttaacatccttgccaaatttgtttcctctaggattgaagtcatcaagctacaggtggtcttacaaatggaaccccaaatgagctcaactcacaacttctaacgaggacaactggattgacccactggccctttgactggcctagagagttcccctctggaggacactaaaactgcagggccccttcttcacccctatccagcagttagtagctagaatggtcattgcccagttcccaagagcagctgtggtgtcctgtttagagggctattgagaggtgaggccagctgaacttcctgggtcaagtggggacttggggaactttcctgtcttacaagaggattgtaaaatgcaccaatcagtgctctgtaaaacacactaatcagctctctgtaaaacacatcaatcagcactctgtaaaacacaccaatcagcactctgtaaaacgcaccaataagcactctgtaaaatgcaccaatcagcaggatcctaaaggtagccacctttcactcttcacaataaaccttgctaccactcactctttgggtccttgccatctttaagagctgtaacactcaccgtgaaggtccacggcttcattcttgaagtcagcaagactgtgaacccactggcaggaaccaactctggacacacaaggactgcgagcacagtcagcactttggcagagaaaggtcacctggatgttacatggcgaggctacagggttgtaagggtcactttaccttcagctctgcactgaggctggctagtccttgagaaactaagtgacctgcttctcagctgtgcaagtaaaaaatcttggcaacacatcatccaaaccatggctcagctgctgcagggccccacagaatagggccctgcctttccttcccatcagcatcccatctgaccctgtctgagtcccatgatggctggctgggtgtgggcagcatgtacacgggagatcatgggtgcttgaaagaagtcgaggctgtacctttctttgcaagaacctgttctctttccctccttgtttttaaaaatattcaatacagtataattttataatgataacagaacctggtccgacttctgtggaaaaggattgatcaacaagcctgagttgggggtttttctgttcagttcgtattagggcccctctaggggagttttctgtgttgtttaggaagggcttctttcataaagaagtaggcccagtgtggtggcttgcacctgtaatcccaacattttgggaggccgaggcaggaggattgcttgagcccaggagttcgagaccagcctggccaccatagtgagactttgttctctaccaaaaatttaaaaattagctgggcatagtggcgcatgcctgtagttccagctacttgtgaggctgaggtgggagaatcgcttgagcctgggaggtcgaggctgcagtgagctatgactgcaacactgcacacagcctgggctacagaacaagacactgtctcacaaaaagaaaaaacaagcaacttattcattttttgtgttgaatgtgacccacgtgcatcttaaaagaaaataaaattcctgtatccaagctaaaaaaaaaaattatatgaaatcgaaaaagaacccaaatagccaatacattcctaagcaaaaagaacaaagctggagctatcacattactaacttcagactatactacaaggctactgtaaccaaaacagcatagtactggtacaaaaacacatagaccaatgaaacaggatatagagcccagaaataatgtgacacacctgccaaaatctgatcattgacaaaattgacaaaaacaaacaatggggaatagtctctctattcaataaatggtgctgggataactggctagccatatgaagaagattgaaactgggtgccttccttacactatatataaaaattcacttcagatgtattaaagacttaattctaaaaccaaaaactatagaaaccctggaaaacaacctaggcaataccattctggatataatacctggcaaaaacctcatgacaaagacacagaaaaaaattgcaaaaaaaaaaaaaacaaaaaaaaacaaaaaaaaaaactggggttggctggctagatggccgaataggaacagctctggtctacagctcccagtgagatcaaagcagaaggtgggtgatttctgcatttccaactgaggtacatggctcatctcattaggactggttagacagtggatgcagccaatggagggtgagccgaaggagggtgggtcgtcacctcacctgggaagtgcaaggggtcgaggaactccctcccctagccaagggaagccatgagggactgtgccatgaggaagggtgaattttggctcagatactatgcttttcccacagtcttcaccacccacagaccaggagattccctcgggtgcctacaccaccagggccctggatttgaagcacaaaactgggtggccatttgggcagacaccgagttagctgcagttttgttttgttttgttttgttttgttcatacccaggtggtgcctggaattccagatagacagaacagttcattctgatggaaagggggctgaagccagggagccaagtggtctagtttagcagatcccacccacatggagcccagcaagctaagatccactggcttaaaattcttgctgccagcacagcaatctgaatcaacttgggatgctcaaccttggtagcgaaaggggcatctgccattactgaggcttgagtaggcagttttcccctcacagtgtaaacaaacccactgggaagttcaaactgagcagagcccaccacagctcagcaaagctgctgtagccacattgcctctctagattcctcctccctgggcagggaatctctgaaagaaaggcagcagcctcagtcaggggattctagataaaattcccatctcccctgggacagagtacctgggggaagatgtggctgtggggacagctttagcagacttaaatgtttctgcctgccagctctgaaaagagtagcagatctcctagggcagcactcaagctctgctaagaaactgactggctcctgaagtaagtccctgatccccatggcttctgactgggagacacctcccagcaggagtcgacagacacctcatacaagagagctccagctggcatctcgtgggtgcccctctgggacaaagcttccagaggaaggaacaggcagcaatctttgctgttctgctgcctccgctggtgatacccgggcaaacagggtctggagtggacctccagcaaaatccagcagacctgcagcacagggaactgactgttagaaggaaaactaacaaatggaaaggaatagcatcaatatcaacaaaatggacgtccacacagaaaccccatccgaaaatcaccaacaccaaagaccaaaggtagataaatgcatgaagagaagaaaaaccagcacaaaaaggctgaaaattccaaaaaccagaatgcctcttctcctccaaaggatcacaacaccttgcccacaaaggaacaaaactggacagagaatgagtttgacgaattgacagaagtgggtaataacacttcataagacttcataaggtgggtaataacaaactcctccgagctaaaggggcatgttctaacccaatgtaaggaggctaagaaccatgaaaaaaggttagaggaattgctaactagaataaccagtttagagaagaatataaattacctgatggagctgaaaaacacagcacaagaacttcatgaagcatacacaagtatcaataccaaattgatcaagcggaaggaaggatatcagagattgaagatcaacttagtgaaataaagcatgaagacaaaattagagaaaaaagaataaaaaggaatgaacaaagcctccaagaaatatgggactatgtgaaaagaccaaacctatgtttgattggtctacatgaaagtgacatggagaatggaaccaagttggaaaactctcttcagaatattatccaggagaatttccccaatctagcaagacaggccaacattcaaattcaggaaatacagagaaaaccacaaacatattcctcgagaagagcaaccccaagaaacataatcatcagattcaccaaggttgaaatgaaggaaaaaatgttaagggcagccagagaaaaaggtcgggttaccctcaaagggaagcccatcagaccaacagcagatctcttggcagaaaccctacaaaccagaagagagttgggggggcaatattcaacattcttaaaagaattttcaacccagaatttcatacccagccaagctaagcttcataagcaatggagaaataaaatcctttacagacaagcaaatgctgaaaaattttgtcaccacctgacctgccttaaaagagctcctgaaggaagcactaaatgtggaaaggaaaaactggtaccagccactgcaaaaacataccaaattgtaaagaccatcgaaagctatgtaaagaccactatgaaaaaactgcatcaactaacaggcaaaataaccacctcacatcacaatgacaggatcaaattcacaaataataatattaaccttaaatgtaaatgggcaaaatgccccaatcaaaagacacagactggcaaattggataaagagacaagaccaactagtgtgctgtattcaggagacacatctcacatgcaaagacacacataggctcaaaataaagagatggaggaagatttaccaagcaaatggaaagccaaaaaaaaagcaggggttgcaatcctagtctctgataaaacagactttaaaccgacaaagattaaaaaagacaaagggcattacatgatggttaagggatcaatgcaacaagaagagttaactattgtaaatatatatgcatgtaattcaggagcacccagattcatgaagcaagttcttagataactacaaagagacttagactcccacacagtaatagtgggagattttaacaccccactctcaatattagatcaaagagacagaaaattaacaaggatattcaggacttgaactcagctctggaccaagaagacctaatagacatctacagaactctccaccccaaatcaacagaatatacattcttctctgcaccatatcacatttatttttaaattgaccacataattggaagtaaagcattgctcagcaaatgcaaaagaatggacatcataacaaagagcctctcagaccacagtgcaatcaaattaaaagtcaagattaagaaactcacacaaaattgcacaactacatgaaaactgaacaacctgctcctgaatgactattgggtaaataaaaaaattaaggaagcactttgggaggctgaggccagtgaatcatggggtcaggagatcaagaccatcctggctaacacagtgaaaccacatctctaccaaaaatacaaaaaaaaattagccaggtgtggtggcgggtgcctgtagtcccagctactcaggaggctgaggcaggccaggaggcggagcttgcagtaagccaagattgcatcgccacaccccagcctgggtgacaaagcaagaatcagtctcaaaaaaaaaaaatttaaggaagaaataaagaaggtcattgaagccaacgagaacaaagacaaaatgtaccagaatctctgggacaaagctaaggcagtgtttagagggaaatttatattatgaatgcccacaggagaaagtgggaaagatctaaaattggcaccataacatcaaaattaaaggaactagagaaacaagagcaaacaaattcaaaagctaacagaaaacaagaaataactgagatatgatcagaactgaaggagatagagacatgaaaaactattcaaaaaatcaatgaattcaggagctggttttttgaacagattaacaaaatagatagatcactggccagactaataaagaagaaaagagagaagaatcaaacagacaaaataaaaaatgataaaggggatatcaccactgatcctacagaaatacaaactaccatcagataatactataaacaccttcatgcaaataaactagaaaatctagaagaaatggataaattactggacacatacaccctcccaagactaaacaaggaagaagtcaaatctctgaatagaccagtaatgagttctaaaattaaggcagtaattaatagcctaaaaaccaaaaaaagcctggaccagacggattcacaaccaaattctaccagaggtacaaacaggagctggtaccatttcttctgaaactgttccaaacaatagaaaaaagggaggactcctccctaattcattttgtgaggctagcatcatcctgatacaaaaacctggcaaaggcacaaccaaaaaagaaaatttcaggccaatattcctgatgaacatcaatgcgaatatcctcaataaaatactggcaagctgaatccagcagcacataaaaaagcttatccaccacgatcaagttagcttcacccctaggatgcaacgctggttcaacatatgcaaatcaataaacgtaatccatcacataaacagaacctatgacaaaaaccacatgactatctcaataggtgcagaaaaggcctttgacaaaattcaacagcctttttgagttttagcaaaaactatcaacaaactagatactgatggaacgtatctcaaaattataagagctatttatgacaaacccacagccaatattatactgattgggcaaaagctggaaacactgatttgaaaactggcacaagacaaggttgccctctctcaccactcctattcaacatagtattggaagttctggccagggcaatcaggcaggagaattatataaagggtattcaaataggaagagagtaaatcaaattgtctctgtttgtagatgacgtgcttgtatatttagaaaactccattatctcagcccaaaatctccttaaactgatgagcaacttcagcaaagtctcaggatacaaaatcaatgtgcaaaaatcacaagcattcctatacaccaataattgacaaacagaaagccaaagcatgagtgaactccaattcacaattgcttcaaagagaataaaatacctaggaatccaacttacaagggatgtgaaggaccccttcaaggacagttacaacccactgctcaaggaaataagagaggacacaaacaaatgggaaaacattccatgctcatggatagaaagaatcaatatcatgaaaatggccatactgcccagagtaatttatagattcaatcctatccccatcaagctaccactgactttcttcatagaattagaaaaaactatcttaaatttcacatagtaccaaaaaagagctaatacagccaaaacaatcctaagcaaaaagaacaaagctggaggcatcatgctacctgacttcaaactaactatactacaaggctacagtaatcaaaacagcatgggactgataccaaaacagatatatagaccaatggaacagaacagaggcctcaggaataatgtcacacatctacaaccattggatctttgacaaacctgacaaaaacaagcaatggggaaaggattccctatttaataaatggtgttgggaaaactggctagccatatgcagaaaactgaaactggatcccttccttacaccttatacaaaaattaattctagatggattaaagacttaaattttaaacattaaaccataaaaaccctagaagaaaacgtaggcaataccattcaggacataggcatgggcagagacttcatgactaaaacaccaacagcaatggcaacaaaagcaaaaattgacaaatttgatctaattaagctaaagactttctgcacagcaaaagaaactatcatcatagagaacaagcaacctacagaatgggacaaaatttttgcaatctatgcatctgacaaagggctaatatccaaaatctacaaggagcttaaacaaatttacaagaaaaaaatgaaaaaccccatcaaaaagtgagcaaagtatatgaacagacacttctcaaaagaagacatttatgccaccaacaaatgtgtgaaaaatagcttatcatcactggtcattagagaaatgcaaatcatagccacaatgatataccatctcaagccagttaatatgatgatcattaaaaagtcaagaaacaacagatgctggagaggatgtggagaaataggaatgctattacactgttggtggaagtgtaactagttcaaccattgtgtaagacagtgtggtgattcctcaaggatctagaaccagaaataccatttgacccagcaatcccattactggacatatacccaaaggattacaaatcattctactataaaaacacatgcacacatatgtttattgcaaaactattcacaacagcaaagacttggaaccaacacaaatgtccatcaataatagactggataaagggaatgtggcacatatacaccatgaaataccatgcagccataaaaaaggatgagttcatgtcctttgcagggacatggatgaagctggaaaccatcattctcagcaaactaacacaggaagagaaaatcaaacactgcatgttctcactcataagtgggagttgaatgatgagaacacatggacacagggaggggaacatcacacaccagggcctgtcaggggatgggggactaggggaaggatagcactaggggaaatacctaatgtagatgacaggttgatgggtacagcaaaccaccatggcatgtgtatacctatataacaaacctgcaattctgcacattcaggaaaatggctaaatcaaatccaaggaaactaagaatacaaccaaatgatacagaagctgaaaggtgaaatagccagtataaaaagaacgtaacatatctgatagagttgaaaaacatactacaagaattttacagtgcaatcacaagtatttacaacagaataggccaagctgaaaaaaagaatctcagaaattgaagacggtctctctgaaataagacagacaaaaataaagaaagagtaataaaaagaaatgaacaaaacctctgaaaatgtggcattatgtaagaggccaaatctgcaaatcactggcatctctgaaagggacaaggagaaaacaaacaacttgggaaatatatttcatgacatcattcatgaaaacttccccaaccttgctagagaggccaacagtcaaattaacaaactacagagaaaaccctgaaagatactacactagaagagtatccctaagacatatgatcatcagatttttcaaggttgaaatgaaaggaaaaaaaatgttaaagacagctagagaaaaagagcaagtcacctataaagggaaccctatcaggctaagagtggacctctcagcagaagagattggggacctatattcaacattcttaaagaaaaatgtctaaaaccaagaatttgatatccagccaacctaagtttcctaaacggaggagaaacacagcctgtttcagataagcaaatgttgagggggttcattactaccacacatgccttacaagaaattgggaaaggagcaccaaatatagaaagaaaagactgttaccagccaatacaaaaacacacttacatacacagaccagtgacactgtaaagcaaccacacaaacaagctgacataataaccagctaacaatacaatgacgggatcaaatccacacatatcagtactaaccttgagtgtaaacaggctgaatgccccacttaaaagacacagagtggcaagctggataaaaaagcaagacccaatggcatgctgtcttcaagagacccatatcatacataatgagactcataggctcaaaataaagaaatggaggaaaatctaccaagcaaatggaaatcagaaaaaagcaggtgttgcaattctaatttcaggcagggcagactttaaaccaacaaagatcaaagaaggcaccaaaaagcattatataatggtaaagaattcaattcaacaggaagacctaactatcctaaatatgtgtgcacccaacacaggagcacccagattcataaagcaagttcttagagacctatgaagagccttagactcgcacacaataatagtggacgaattcaacactccaataacagtactagacagattgtttaagcagaaaactaacaaagatattcaggacctgaacttaatgttagaccaaatggatcttcatcagaaactacatagacttctacagcactctccacccataaacaacagaacatacattctctcatcaccacgtggcacatactctaaaattgaccacattattagacatgaaacaatcatcagcaaatgcaagagaactgaaattatgtaaaacacactcttggaccacagtgcaataaaaatacaagtcagaactcataagatagctcaaagaccattaaaaaataaacaacatgcttttaaatgacttttgagtaaataataaattaagtcagaaataaaggtcttggaaactaaagagaataaaaatacaacataccagagtctctgagacacagccaatgcagtgttaagagagtaacttatagtacttactgccacatcaaaagtaagaaagatctcagataaacaatgtaatgttacaactgaaagaattagagaagcaagagcaaatcagtcccaaagctagcaggagacaataaataaccaaaatcagagctaaagtgaaaaaaaaattgagacacaaaaatacattcaaatgatcaatgaatccaggagttgctttctgaaaaaaaaaaataataagctagataggccgctggctagactaataaagaagaaaagttccaaataaacacaattagaaatgacaaaggggatgttaccactcaccctacagaaataaaaataaccatcacaaactgctatgaacacctctatgcacacaatctagaaaacctagaagagatggttaaatttctgtacacatacactatcccaagactgaaatagaagaaattgattccctgaacagaccaataatgagctctgaagttgaatcagtaataaataacctagcaaccaaaaaaaaaaaaaaaaaaaaagcccagaaccagatggattcacagcctgattctaccagatataaaaagaagatctggtatcatttctcctgaaactattcaaaaaattgaggagagactcctcccccaactcatcctatgaggccagcaacatccttataccaaagccaaaatacaacgagaaaagaaatctactggccaatatttttgataaacataaatgcaaaaattctcaatccaatactaccaaagcaaacttaacacatcaaaaatattataacataaccagctggaatttgtccctgagaagcaagcttggttttatgcaagtcaatcaacatgatgcaccacatttacaaaataaaagataaaaactacatgattatctcaatagatgcagaaacaatataacgtagtttattatcctttgatgataaaaatcctcagaatagatataagaagcaaattttctcaacataatagtggccatttatgaaaagcccacaactaaaatcataatcagtggagaaaaaaaaatggaaagattttcctctaagatctggtacaaggaaaggattcctactcaacagagtactggaagatctagcaagagcaatcagacaaaaaatacaagagagaaggaggtgaagcaacatggctgaatagagacctccagtgatcatctcccaccatgagaacaccaaactgaacaattattcaaatttttaaaaaaaagcaccttcataagaaccaaaaatcaggtgaggaaacacagtacctggttttaacatcataataaggaaggaggccttgaaaggtgtggaaaagacactctaaaataacctacaccacccctcccccatcccccagcagtgatcatgtggtgcatagaaagaatttgtgcacttgggggagagaaagcacagggattatgtgactttgcattggaactcagtgctgccctagcacggtggaaagcaacatggagcagaacttagccagcactcataaaggcagcatttagaccagcccttgccagaggtgaattgtccatcccagcagttggaacctgagttatggtaagccctgctgccatgggctgaagtgttctgaggtcctaaataaattgaaaatgcagattggccacaaggaatgaaattcctgggcaagtcctggggctgtgctgggcttggaaccagtagacttgtggtgcatgtaatctagggagaccagctggggtgaccaagggagtacttctgtcacccctccccaactccaggcagcacagcacacagctctaaaaaagactccttcttccactaaaggagaggagagcgagagtaaagaggacttagtcttgcaacttggataccagctcagccactgtacaataggacaccaggcagagttctgagggcccccatcctagaccctagttctcagtttacatttctggacacaccctgggccagaagggaacccactgccttgaagggaagaacccagtcctgacagaattcatcatggactggctaaagagctcttgagccctgaataatcaccagtggtcaccaggaagtactcactgtgggtcctgggtgagactcagagtcatgctggcttcaggtgtgacccaccacattcccagctgtggtggctacagggagagtctcctgcaagatgatacatcaatgagtttgcaactgcaatagcatttgtgggtttagggtgctccctaaggcagagatggatgtagtgatcaaagacttaggtcacaaaccttttgaatacctcaaaagccttcccaagaaggataggtacaaacaagcccagactcccaaagatcaaggataaaaaaggattctaaaagcagcaaaagaaaagaaactaataacatacaaaggacttcaatacgtctggcagcagacttctcagtggaaatgttacaggccaacaggaagtgacatgatatatttaggggactgaaggaaaaatattttatcctaaaataatataaccaacaaaaatatccttcaaacatgaagaagaaataaagagtttaccacacaaacaaaagctcagggattttatcaacaccacaccattcttataaagaatgctaaagaaagttcagtctggaagaaacagatgttaatgagcaatagcaaatcatctgaaggtccaaaagttactgttaatagcaagtacagagaaaaacacaatgttataacactgtcatagtggagtataaactattcatatcttgagtagaaaggttagtaaatgaactgatccaaactagtaactacaacttttcaaaacataacacgaaatgatataaacagaaacaacataaagttaaaaagagacaaaggagggacaatgttaaggtatagagtttttattagttttctttttgattatttgtttatgcagtcttaagtagtcatcagtttaaaataatgggttagcaaatgattacaaatcattctactataaagacacatgcacatgtatgttaattgcagcactgttcacaatagcaaagatgtggaaccaacccaaatgcccatcaatgacagactggataaagaaaatgtggcacatacataccatggaatactatgcagccatgaaaaagaatcagttcatgtcctttgcagggacatggatgaagctggaaaccatcattctcagcaaactaatacaggaacagaaaaccaaacatcgcatgttctcacttataagtgggagttgaacaatgagaacacatggacacagggaggggaacatcacacactggggcctgtcagcaggtgggggtgctaagggaaggatagcattaggagaaatacctaatgtagatgacgagttgatgggtgcagcaaaccaccatggcacatgtataccgatgtaacaaaactgcacgttctgcacgtgtatcccagaacttaaagtataataaaaaataatgattataaaataaaataatggattagaagatatatttgcaaaccttatgataacctcaaatcaaaaaaaatatatcagataacacaaaaaattttaaaaagaaattaaaacatatcacaagagaaaaaacactttcactaaaaggaagactggaaggaaggaaaaaaggaagagagaggctgcaggatatccagaaaacaaataaaatgtcacgaataagtccctgcttagcaataataacatagaatgtaaaaagactaaactcttcaatcaaaatacacttgctgaatgaataaaaacaacaagacccaatgatatgttacctacaaaaaacaatttatctataaagatacacataaattgaaaataaataaataaagtaagatgttccaagcaaacagaaaccaaaaaaggggaggattagctatacttagacaaaatagatttcaagacaaaacctgtaaaaagagacacagaatgccattatataatgataacgatgtcaattcagcaacgggatataataattgtaaatacgcatgcacctaatgctgaagtacccagatgtataaaacaaatattattagatgtaaaaagataaatagacccccaatacaataatagctggatatttcaataccacagttttggcaatgaacagatcatccagacagaaaaatcaataaagaaacatcagacttaaactgcactgaagaccagatgaatagatatttactaaacattttatccaaccactaacgaatacacattgtctatcctggattattctctaggatagacaatatgttaggccacaaaacttgtctttaaacttccaaaaaaatgaaattatattaagtatcttctctgatcacaaatgaataaaactagaattcaataacaagaggattttgaaaatcatacaaacacatggaaattaagcaatatgctctggaattaccagtgggtcagtaaagaaattaagaaggaaacttaaattttttcttgaaactggcaggtgcagtggctcacatctataatcacagcactttgggaggccaaggtggggggattcctttagcttaggagtttcagaccaacttgtcactaaaaaataaaaaaaaaatttttttaattgattatctgggcttggcagtgtgcacttgtagtcccagttactcaggaggctgagacaggaagatcacttgagctcaagaggtcaaggctgcagtgagctgtgatcatgcctgtactctatcctgggtgacagagacagactttgtctcaaaaacaaaaaaagaaaattcttgaaacaaataaaaaaggaaacaccacataccaaaacctatgaatacagtgaaagcagtactaagaggaaagtatatagcaacaagagcctgtgtcaaaaaagtagaaaaaatttaaataggctagaaacagtggctcacacttgtaataccagcaatttgggaggctgaggcaagtggatcacttgagctcaggagcttgagaccagactgggcaacatggccaaaccctgtctctataaaaaagtacaaaaattagccaggtgcacatatgtagtcctagctacttgagaggctgaggtaggaagactccttgaacccaggaggttcaggctgcagtgaaccatgtatgcaccactgcactccagcctgaaggacaaagtgaaactatgtccaaaaaaaaaaaaagcttaaatagtctaatgatacatcttaaagaactagaaaaacaagagcaaaccaaatccaaaattagtacaaggaaagaaataataaatattacagtagaaataaatgaaaatgaaatttaaaaatacaaaaaactcaatgaaacaaaaaagttgttttgtgaaaagctaaacaaaattgacaaaccattaacccaactaactttgaataaaagagaaaagactcaaataaataaagtcagagattaaaagggaggcattacaactgatactgcagaaattcgaagtatcgttggaggctactatgaacaactctatgataataaattggaaaacctagaaggaatggataaattcctagacacatacaacctaccaggattgatccaggaataaatccaaaacatgaacatgccaataaaaagtaatgaaatcgaaactgttctgaagaagtctctcaacaaagaaaagcctgggaccgaatggcttcactgctaaattttaggaaacatttaaagaagaattattatcaaacatcctcaaactattaaaaaaaaaaaaaggaggatggaatacatccaaacttattctatgaggccagtattaccctgacaccaaaagacacattaaaaaagagaagaaaagaaaacttcaggccaatatcccggatgaaaattggtgcaaaaatactcaacaaaatgctagcaaaccaaattcaacaacacattaaaaagatcattcatcatgtccaagtgggatttatttcagggattcaagaacggtccaacatatgcaaatcaatcaatgtgatacatcataacaccagaatgaaggacaaaaaccatatgatcattttaattgatgctgaaaaagcacctgataaaatttaacatctcttcatgataaaaccctcaaaaaaacaggtatagaagggacatacctcaacacaataaaaaccatacacaacagactcatgacttgtatcatactgaatgggaaaaactgaagcctttcctctaagatttggaatacaacaagaggatgccaattttcactgctgttattcaacataatactggaaatcctagctataacagtcggacaaaagaaagaaaaaaacatgcaaccagattggaaagggaagaagtcaaattatccttgtttgcagatgatataatcttatatttggaaaaacctaaagactccaccaaaaactattagaactgatttttaaaattcatgaagttggaggatacaaaattaacatacaaaaatcagtagcatttctatatgccaacagtgaaaaatctgaaaaagaaatcaagaaagtaatcccatttacaatagctacaaataaaataaaatatctagaaataaatttaaccaaagaaatgaaaggtctctacaatgaaaactataaaatattgatgcaagaaattaaagagaaacaggcatggtggctcatgcttataatcccagcatttgaggaggccaaagtgagaggactgcttgggcccaggagctcaagaccagcctgggcaatatagtgagaccatatctctacaaaaaataaatttaaggaaaaaattagctggatgtggtggtgcgtgcctgtagtcctagctatgcggtaggctgagatgggaggataacttgagcctgggaagttgaggcttcagtgagccatgattgtgccatgatactccagctttgccctccagaactggagggcattatgttaagtgaaataagccaggcacagaaagacaaactttgcatgttctcacttattaaaaattaaaacaattggtgacaaagtgagacgttgtgtctaaaaaacaaaacaaaaaaaaggaagaaattcaagaggacacaaaaaactggaaagatattttatattcatggattagaagaatcagtattgttggctgggcatggtggctcacgcctgtaatcctagcactttgggaggccaaggtgggtggatcatttggaatcaggagttcaagaccagcttgacctacatagtgaaaccccaactctactaaaatacaaaaattagctgggtgtggtagcgggcacctgtaatcccagctactcagaatactgaggcaggagaatcccttgaacctaggaggtggaggttgcagtaagccaagatcgtgccactgcactccagcctaggcgacagagcaagactccctcttagaggaaaaaaaaagaattaatattgttaaatatccatactacccaaagaaatctacagattcaatgtaatctctatccaaataccaatggcattcttcacagaaatagaaaaaagtaatcctaaaatttatataaaatcacaatacacacagaatagccaaagccaccctaagggggaaaaatactggaggaatcaaattatctgacttcaaattatactacagatctatagtaatcaaaacagtatggtactggcataaaaatagtcacattgaccaatgaaacagaataagaactcagatataaattcatacatctacagtgaattcatttttgacaaagttgccaagcacatacactgggaaaagaacagtctcttcaacaaattctgatgggaaaactggatgcccatatgcagaatgacactagacacctatctctagccatatacaaacatcaaatcaaaatggattaaagacttaaatctaagatctcaaactatgaaactactaaagaaaaacattggggaaactctccaggacattggtctcagcacaaatctattgagtaacaccccacaagcacaggcaaccaaagcaaaaattgacaaatgggatcacatgaagtcaaaaagcttcttcacagcaaaggaaacaatcaacaaagcgaagagacaatccacagaatgggagataatatctgtaaactatccatctgacaaaggattaattaccagaatatataaggagctcaaacaattctatagaaagaaaatctaatattccaatttaaaaataagcttaagatctgaatagacattgctcaaaagaagacatacaaatggcaaacaggtatataaaaaggtgctcaacatcattgatcagagaaatgcaaatcaaaactagagtaaaatatcatctcatcccagttaaaatggcttttatccaaaaaacaagcaataacaaatgctggcaaggatgtagagaaaggggaaccctagtacaatgttggtgggaatgtaaattagtacaacctgtatggagaacagtttgaagttttctcaaaaaactaaaagtacaactaccctatgatccagcaatcccactgctaggtatataccccaaagaaaggaaatcagtatactgaaaagatatctgcattctcatatttattgcagcactattcatgatagccaagatttggaagcaacctatgtgtctatcaacagatgaatggataaagaaaacatgacacttttcaactttgtggttgaaaacatgagaccttgtcatttgcaacaacatgagtggaactggagggcattatgttaagtgaaataagccaggcacagaaagacaaactttgcatgttctcacttattaaaaattaaaacaattgaacttatggagatagagagtagaataatggttgccaaaggatggaaagggtaatgggggtgagagggggaggtaaggattgttgatgggtacaaaactatagatagaatgaataagagctagtgtttggtagcacaacagggtgactactgtcaataataatttattgtacatttttaaacattgaaagtgtataattggattttttgtaatgccaagaggataaatgcctgaaatgatggataccacatttaccctgatgtgataattatgcattatatgcctgtatctcatatacctcatgaatatatatatctattatgtacccacaaaaatttaaaaaaaggaaataagaggcatccaaattggaaagaaaaacgtaaaactatctctgtttacagaagacacgtcatatatttagaaaatgctaaaactacacacacacacacacacacacacacacacacacacacacacacaaactcttagaactaatccagtaaagggcaggatacaaaatctactgttactttttaaagactttaaagcaattctctgttttgttttttcagttatcatcaatatgctacctttaaaaaaaaagttttacttacattatggatacctgttttccactccagccctaacctggcttattgaagaacacagtacattcacttctctgaacatagtacattcacttctatgatagttttgcccccataagaggacagtagaccatatgtcttcaccatctggcaacagaagctataacaatggtgtattagtttcttagagcttgtgtaacaaagaaccacaaattagatgtctttgaaaaaatagatgtattatttcacagttctggaagcttgaggtctgaactcaaaatgtcagaatgaacatgcttcttctgaagcctgcaacagagagttcttccttgcctcttcacagcttctggtggtttttggtaatccttgatgttccttggcttgcaactgtagctcttaaatctctgcctcagtcataatctggcactctcttcatgtgcctgcgtctctgtgtctcctctcttcttatgaagacatcagtcatattagatttagggtctaacctactacaacaggacctcgccttaactacttagatttgcaacagctctatttctgaataagatctcattctgaggtcctgagagctagaacttcaacatatttgaggggaagggacataatttaaaccataacgaatggataaatacctgacacaaaccaggctgtctcagagagagtagcttcctggaaaagtggagtctatgacaagacttgtgagtaagtagtatacttgggaagcaaacccagtgagcagaagtgagaggaagagaagagtgagaaacgaaagaaggaagaacccatagaaagatgtgttattgagattgccactgtggatgcaaagggctctattctacatggacttcaaaaaagtgtacagaacacctctcaaaactacctgctgggagaatgaaaagcagcagtatttatgcacacgctctcactgtttattgttagtgtgctaactcccaaagaatttgaattattcactcttaaaaaccaatgcacatagacaaagtgaaccctccaagggcatccctagcatatcagaggagctccagagacaaaagcaaagatttttggtaagaaattgtcagctcgaagagaatagaagcctctgtttcatacacctggagccatgcctgtctcagtgtcctctgatccaaccatgctgtccctcatgtgaaattcagccctttcattgttttccacagcccaaaacaatctcagtaagaatttgtcacaatgggggaggagccaagatggccgaataggaacagctccagtctacagctcccagcatgagcgatacagaagactggtgatttctgcatttccatctgaggtaccgggttcatctcactagggagtgccagacagtgggtgcaggtcagtgggtgcgtgcactgtgtgtgagccaaagcagggcgaggcattgcctcacttgggaagcgcaaggggtcagggagttccctttccgagtcaaagaaaggggtgacagacgcacctggaaaacccggtcactcccacccgaatattgcacttttcggaccagcttaaaaaactgcacaccacgagattatatcccacacctggctcagagggtcctatgcccacgaaatctcactgattgctagcacagcagtctgagatcaaactgcaaggtggcagcgaggctgggggaggggcgcccaccatcgcccaggcttgcttaggtaaacaaagcagctgggaagctccaactgggtggagcccaccacagctccaggaggcctgcctgcctctgtaggctccacctctgggggcagggcacagacaaacaaaaagacagcagtaacctctgcagacttaaatgtccctgtctgacagctttgaagagagtagtggttctcccagcacgaagctggagatctgaaaacgggcagactgcctcctcaagtgggtccctgacccctgacccccgagcagcctaactgggaggcaccccccggcaggggcacactgacacctcacacggcagggtattccaacagacctgcagctgagggtcctgtctgttagaaggaaaactaacaaacagaaaggacatccacaccaaaaacccatctgtacatcaccatcatcaaagaccaaaagtagataaaaccacaaagatgggggaaaaaacagaacagaaaaactggaaactctaaaacgcagagcgcctctcctcctccaaaggaacgcagttcctcaccagcaacggaacaaagctggatggagaatgactttgacgagctgagagaagaaggcttcagaagatcaaactactctgagctacggaaggacattcaaaccaaaggcaaagaagttgaaaactttgaaaaaaatttagaagaatgtataactagaataaccaatacagagaagtgcttaaaggagctgatggagctgaaaaccaaggctcgagaactacatgaagaatgcagaagcctcaggagctgatgcaatcaactggaagaaagggtatcagcaatggaagataaaatgaatgaaatgaagcgaaaagggaagtttagagaaaaaagaataaaaagaaatgagcaaagcctccaagaaatatgggactgtgtgaaaagaccaaatctacgtctgattggtgtacctgaaagtgatggggagaatggaaccaagttggaaaacactctgcaggatattatccaggagaacttccccaatctagcaaggcaggccaacgttcagattcaggaaatacagagaacaccacagagatgctcctcgagaagagcaactccaagacacataatcatcagattcaccaaagttgaaatgaaggaaaaaatgttaagggcagccagagagaaaggttgggttaccctcaaagggcagcccatcagactaacagcggatctctcggcagaaaccctacaagccagaagagagtgggggccaatattcaacattcttaaagaaaagaattttcaacccagaatttcatatccagccaaactaagcttcataagtgaaggagaaataaaatactttacagacaagcaaatgctgagagattttgtcaccaccagtcctgccctaaaagagctcctgaaggaagcgctaaacatggaaaggaacaaccggtaccagccgctgcaaaatcatgccaaaatgtaaagaccattgagactaggaagaaactgcatcaactaacgagcaaaatcaccagctaacatcataatgacaggatcaaattcacacataacaatattaactttaaatgtaaatggactaaatgctccaattaaaagacacagactggcaaattggatagagtcaagacccatcagtgtgctgtattcaggaaacccatctcacgtgcagagacacacataggctcaaaataaaaggatggaggaagatctaccaaccaaatggaaaacaaaaaaaggcaggggttgcaatcctagtctcggataaaacagactttaagccaacaaagatcaaaagagacaaagaaggccattacataatggtaaagggatcaattcaacaagaagagctaactatcctaaatatatatgcacccaatacaggagcacccagattcataaagcaagtcctgagtgacctacaaagagacttagactcccacacattaataatgggagactttaacaaacaccccactgtcaacattagacagatcaacgagacagaaagtcaacaaggatacccaggaattgaactcagctgtgcaccaagcagacctaatagacatctacagaactctccacgccaattcaacagaatatacatttttttcagcaccacaccacacctattccaaaattgaccacatagttggaagtaaagctctcctcagcaaatgtaaaagaacagagattataacaaactgtctctcagaccacagtgcaatcaaactagaactcaggattaagaatctcactcaaaaccgctcaactacatggaaactgaacaacctgctcctgaatgactactggatacataacaaaatgaaagcagaataaagatgttctttgaaaccaacgaaaacaaagacacaacataccagaatctctgggacacattcaaagcagtgtgtagagggaaatttatagcactaaatgcccacaagagaaagcaggaaagatccaaaattgacaacctaacatcacaattaaaagaactagaaaagcaagagcaaacacattcaaaagctagcagaaggcaaaaaataactaaaatcggagcagaactgaaggaaatagagacacaaaaaacccttcaaaaaattaatgaatccaagagctgattttttgaaaggatcaacaaaattgatagaccactagcaagactaataaagaaaaaaagagagaagaatcaaatatacacaataaaaaatgataaaggggatatcaccaccgatcccacagaaatacaaactaccatcagagaatactacaaacacctctacgcaaataaactagaaaatctagaagaaatggatacattcctcgacacatacactctcccaagactaaaccaggaagaagttgaatctctgaatagaccaataacaggagctgaaattgtggcaataatcaatagcttaccaaccaaaaagagtccaggaccagatggattcacagccgaattctaccagcggtacacggaggaacttgtaccattccttctgaaactattccaatcaatagaaaaagagggaatcctccctaactcattttatgaggccagcatcattctgataccaaagccaggcagagacacaaccaaaaaagagaattttagaccaatatccttgatgaacactgatgcaaaaatcctcagtaaaattctggcaaaacgaatccagcagcacatcaaaaagcttatccaccaagatcaagtgggcttcatccctgggatgcaaggctggttcaatatacacaaatcaataaatgtaatccagcatataaacagagccaaagacaaaaaccacatgattatctcaatagatgcagaaaaagcctttgacaaaattcaacaacccttcatgctaaaaactctcaataaattaggtattgatgggacgtatctcaaaataataagagctatctatgacaaacccacagccaatatcatactgaatgggcaaaaactggaagcattccctttgaaaactggcacaagacagggatgccctctcccaccactcctattcaacatagtgttggaagttctggccagggcaatcaggcaggagaaggaaataaagggtattcaattaggaaaagaggaagtcaaattgtccctgtttgcagatgacatgattgtatatctggaaaaccccattgtctcagcccaaaatctccttaagctgattggcaacttcagcaaagtctcaggatacaaaatcaatgtacaaaagtcacaagcattcctatacaccaacaacagacaaacagagagccaaatcatgagtgaactcccattcacaattgcttcaaagagaataaaatacctaggaatccaacttccaagggatgtgaaggacctcttcaaggagaactacaaaccactgctcaaggaaataaaagaggatacaaacaaatggaagaacattccatgctcatgggtaggaagaatcaatatcgtgaaaatggccatactgcccaaggtaatttacagattcaatgccatccccctcaagctaccaatgactgtcttcacagaattggaaaaaactactttaaagttcatatggaaccaaaaaagagcccagatcgccaaggcaatcctaagccaaaagaacaaagctggaggcatcacactacctgacttcaaactacactacaaggctacagtaaccaaaacagcatggtactggtaccaaaacagagatatagatcaatggaacagaacagagccctcagaaataacccagcatatctacaactatctgatccttgacaaacctgagaaaaacaagcaatggagaaaggattccctatttaataaatggtgctgggaaaactggctagccatatggagaaagctgaaactggatcccttccttacaccttatacaaaaatcaattcaagatggattaaagacttaaacgttagacctaaaaccataaaaaccctagaagaaaacctaggcattaccattcaggacataggcatgggcaaggacttcatgtctaaaacaccaaaagcaatggcaacaaaagccaaaattgacaaatgggatctaattaaactaaagagcttctgcacagcaaaagaaactaccatcagagtgaacaggcaacctacaaaatgggagaaaattttcgcaacctactcatctgacaaagggctaatatccagaatctacaatgaactcaaacaaattcacaagaaaaaaaaaacaaccccatcaaaaagtgggcaaaggacatgaacagacacttctcaaaagaagacatttatgcagccaaaaaacacatgaaaaaatgctcatcatcactggccatcagagaaatgcaaatcaaaaccactatgagatatcatctcacaccagttagaatggcgatcattaaaaagtcaggaaacaacaggtgctggagaggatgtggagaaataggaacacttttacactgttggtgggactgtaaactagttcaaccattgtggaagtcagtgtggcgattcctcagggatctagaactagaaataccatttgacccagccatcccattactgggtatatacccaaaggactataaatcatgctgctataaagacacctgcacacgtatgtttattgcggcattattcacgatagcaaagacttggaaccaacccaaatgtccaacaatgatagactggattaagaaaatgtgtcacatatacaccatggaatcctatgcagccataaaaaatgatgagttcatgtcctttgtaggtacatggatgaaattggaaatcatcattctcagtaagctatcgcaagaacaaaaaaccaaacactgcatattctcactcataggtgggaattgaacaatgagatcacatggacacaggaaggggaatatcatactctggggactgtggtggggtggggggaggggggagggatagcattgggagatatacctaatgctagatgacgagttggtgggtgcagccgcaccagcatggcacatgtatacatatgtaactaacctgcacaatgtgcacatgtaccctaaaacttaaagtataataaataaataaataaaaaataaataaaaaaagaatttgtcacaaaggacatattgtatgatttcacttatatggggtgcctaaagttgtcacattcatagagatagaaagtagaatagtagtttacaatggctgtggggaggggaaagtggagagataatgggtatggagtttcagtttggaaaacaaaaattctggagatggatggtggtgatggctgcaccacaatatgaaggaatctaatgccaccgaactatatacttaaatttagttaatgtggtaaatattttgtgtgatatattttgtgctattatatatatatatatatatagtatatatatagtatacatgtatagtgcgatatattttgtgctattatatatagtatacgtatagtatacgtatactatatatatactatattctatatatacaccatatataatatcatttgaaaacattaaaattttaattaaattttaatttaaattttaattaaaaacaatttgtgagtttatcagatgttcctaaagatttggggtggattcacattatgcaatttcaatcttctactgtcctttctcttcctcttcccactctgcccctcatacccccgctttcccattgccttgggcacaccaaattctacctcttctattacaaagataattattttcctaaataaagacacttctatgcaaaaagaattctggtgactgctatttgaaaaataacattgtctccttattacacacaagttagactggccagatttctaagttttaggaacaaaaactacctctgactaaagcacaagtacttatatacatatttcctagaaagaatgagattgtctttcttaggcgtctcttcaaactataagtgtgtgacattaattatagaaagttgtagcacactgaatgagcatatcacacattaatattttcatatctctgaattatgtaacagcagagagaggagagatgaagtgttggagaaatattgaaatagaacttacgttttctggcttctaaattagcagagtgtattagaagactgtgcctggatatctgaaaacagccaaaaagggagctgccgcctctctaatttaatgccaaactcccgggagtagtttactgccagggttttatcatgtattatgaggacaagtattggcaggcttccatgagatccatataagcttttaactcctagatcaggtcattgactgataactggatcctcatatgggcttttactatcattttagtaatactcttggtgattgagttgactcccataaatctagtcctgctactaccccactggagtgtatagtgttgattcctaaccacctaccactcttgtacattaacatttcataaaagctctacttacaggtctcctaaaagctttctcatagatagactagagtcttcaaagtcctttttctttcccaataactgaaaatagttcttataccttaataataattcaaaaacaaatggactttttctatataaaaatacaatatgttattcgggcagcaacaatataccaaagttgttaataggtggccctgacttaatattcttaactgttctatgttcctatagaatcacaaaatgtcagtatttgaggattgattaaagaacagctaatccagggattaaaatggctcatctatagggtggatctggtttgcagacatgtattgttcagcacacacaatatttctaaacatttggaattatccaccacattttcaaatattgcacatcaatatctgaagatctggcaatactagactggtgttctcttgtagtaattatgggctggagccaggtagttgatgatacctttgttctcgtctttaccacagtcctcaccacattgtgctaggtttttgtcacatcctttgctcatctcatcatgaggcctgaattttatatggatttgaaaatttgattggtgtcattttagagattagaaaacatgagatgtagagtgcttaaataactctcctaagagcaaataaacaattactgaaaaaggtacctgaaccgaatcttatgtctacacaaattgctgtaacataaagtgcttcaatggtctaagagatacaggttgaggaaacctgcattgtactaccatgtctcttctcttaaagtttattttccaagtttttaagtactttattaggtcaagttttttttccacaatcttcaatttacaataaatgatcaaaatttttaattctaaatatttaaaataaaattcatctaattcttattcaatattatattccagcagtcttacaggctttagttatggtttttcttttctttttctctttcttttttttttttttttttttttgagatggagttttgctcttgttgcccaggctggagtacagtggcgcaatctcagttcactgaaacctccacctcccggcgtcaagggattctcctacctcagcctcctgagtagctgggattacaggcacacaccaccacactcagctaattttttgtatttttagtagaaacggggtttcatcatgttggccaggctggcctcgaactcctgacctcaggtgaccaacctacctcagcctcccaaagtgtagggattacaggcatgagccaccgcgcccggccatggtttttattttctaagtgacaaactgtgcttggatatttttggatttttatttaatctaacaaacttaaaaccaaaaaacaaaatgtcaatagtcagatgaatgtacgttttttctgtcttgaatcatttcaaataatgactgtgtttttaaaaatgtgaagtatgtctaattatctattattgtaatgctttttctgtattcatagtcaaaatatactctttgtgtattttattgatatatattagttgtatatattttgggggtacaagtgatattttgatacccttacacaatgtgcaataatcaaatcagggtaacatagatatccatcacctcaaacatgtatcttttgtttgtgttgggaacattacaaatcttctcttctagggcgaggtggctcacgcctgtaatcccaacacttatagaggccaaggcaagcggattacctgagctcaggagttcgcaacgagcctgggcaacacagtgaaaccccgtctctactaaaatacaaaaaaaaaaaaaaaattagccgggcttggtggcagtctcctgtagtcccagctactcgggaggctgaggcaggagaattgcttgaacccgggaggtggagtttgcagtaagccgagatcgtgccactgcactccagcctgggtgacagagcgaggcgcctctcaaaaataaataaataaataaataaaaataaaaatatatatatccaataagtattgttaattatagtttgcctactgtactccaaatactagaacttatttactctatctaaatgtatttttataccccttaatcaacttctctttatcccccttcccccttcacttcccagcaggatatgctctttaaaataattactaatgaatatttttgccaaaaataaaacacatacaccagttcctaacactgattatcaagatatttatttataataattagaagataattagaactattactgaacttatgagaagaaagaatcccagctcaaaagaggaggctgagcaaatgacccccactgagagaataaatctgagaaactgaaaacgattttctaatatgcaatgaaattttagtaaaataaatatgcataaactgacattttaagagaactctctaaaaattactaattttatatgaaaacataaaacattgttgctaaaataaaaatatcaagagagtgatagaacagcaaaatagatgctactaagtagaatattgggaataattcaagtaattctccaaagaagcaatatgaaaatatttaaaattaaaattatgctttaaaatatacaaggaatggaagacagttgcaaaatttaaaaaaaaaacagactaaagagaagattcatcaaaaataaaacgacattaattgttcctgaaccaaagaaaaacttgagtctcagataaaaagaactaactgaaagcagggcagattatttgggagaataaaacttatttgtagaaatagcccagaaaaatacatattttctaaggctaaaaagaaatttgaatcgcttctaaataacaaagcaactcaagaaaaataaatcagtaagcatcaaactttcatctataacactaaatggtataacacaataaaccacaagaattctcaaaattaaatagtcattctaacaaacgttcataaaagagggagaaaagaatagtaagagtgtgtgtgtgtgtgtgtgtgtgtgcgcgcgcacatgaatgcaagcacactaaagagccgagcaatgggatgtagtgacaggtattgtttctgtgtgcttaggaacacctccctgttgaactttccttcccctgctcattacagtgctgctagactgataattccaggaccttgcccacttgatcactggggtggaacttacatactgtccttcagtggtttgaatcttcaatagagaatcacatgaatgcaacatgatggaaattgattcttctattaacagaattctttaacctcaccaaatacacttttgctagttcatcacctgttttagagttgtttttccattttgttgaattaatgcatgcacttttcccattttttacatctgttagtccatctcctagaaacaactattctaccccgtatcatttttacacaatttctacttccatatcttttaataatatacttcttatgctgttttctgatttataaaatttaggtataatctaattattataataaatgaggaatcattggcttaccactagcctccttccaaccagttgttatatccatattttgagttcccgtgtagtttctttgtgtctttagtaaaatattaacatctttattttttatttcaaagctgtgggaatgtatattttgtagcagtaaacccagtgcatactttggccaaatactaagccaaacccaaagatgttgcatccataatctttcttctcatgtttgatgatgatattaatgaccatagttttcatttcagcatcactatgttcttttctcctgcaaattttatcatctgcataataacttttgcaatgctaaagttaagggtattgatatataattaattctgccatgggttagctgtaggttgaagtctaatttgaaagtcattgagagcgttaagaatgtaaacatggttttctgcagatcaaagcagtgtagattgatcgttgtgatatttttaacttttatattatgttcagggatacatgtgcaggttttttatataggtaaactcatgtgatgggggtttgttgtacagattatttcattatccaggtactaagtctagtatccaatagttgtttttttctgatcctcttcctcctcccacccttttgtcttgtcttcaaatttattagtattttatatctactgggatggagaaaaagcctagaaaaataagtatagttttactgaatcaccatttcttttgatgcctctgtttagactgcctgccctccaggcctgctgcatggctgtatttctggggtttccctttgtagctcttctagagacaaattggccccacagtctccaggatgccaagattttttctgcttaccttttcttcctcatttagatgcagcccaacctcaaataacctcccttgcaagggagcagaagatattttatgactttttttacattatttattagaaatccaatgtcattctgtactatcttctaacattcaacattgctgatggaaaatgtgatatgagacttgccatttttctgcaggtcacattgtttcctcaagaaaaattttagaaacttctctatatccttagcaatctgaattttcacaatggtatgtgtattagtcagggttctctagagggacagaacgaatagaatagatatatacgtaaaggggagtttattaagtagtattaactctcacaatcaaaaggtcccacaataggccatctgcaaggaacagggaagccagtctgagtccaaaggctgaagaacttggagtccaatattcaagggcagaaaacatccagtgcaggagaaagatgtaggatgggaagctaagccagtggagcctttttacttttttctccctgcctttatatcctggctgagctgacagctgattagatggtgcccacccagattaagggtgggcctgcctttaccagcccactgactcaaatgttaatctcctttagccacaccttcacagacacacctaggatcaatactttgcatcctttactccaatcaagttggcactcagtattgaccattacaagtccaccgcttgtcaacttgaacccatacgcacctcctgagatcatacataatcttcaaataaagacaatactaaggtataattatgcctaacataatataactgtccttcgtacaaccagaaatccaccaatcaccaaaaaaaatgctattacatagagttaacaatacttaaatgctgatatgaagtcaataaatctaatgtcacataataaaggagaaaagaaaatgaaatggagatatgttcttagtacaagtgtatacatgcacgaacatgtttttaacaaaagaaggaggaaacactcattacaattacagtccttgtttctgcaactggccacatgatcctcgctggatttgatgactaccttctactacccattcagtatttcctttgccttcagcaagcacctcagcaggtcacggtttttttgtggtagagtgacccaaaccattcctgaaggctctgggccatttgtattcctgcctgtattgggctgttatagtttcccattgacattaatcacaggacatgggaatactaagagatgccctgatggatctcctgtattccatgcatactcttccttacctctgttgtggagtactaaactgatttcatcttaatggtctgggtcaatcaccccagtcaacactgtaactctctccttagactgttgacttaaaggtaggagaagcccaaagtgtccaggtggcaatcttaacttccaatttaatggaattgttcgtgtgcctcctgatggcagtgttcctctctctggaactaagacctctaggccagtagaacataatgtcatgggaacaggaagcaaaattttgctagtggatcactaggggtgatggtgagtcatgccactaccacttccaccccttgattcctgggcccatgaattctggctataggagaaaaaataccatataatggatgctggctcagagcatacatagctttctggagaactttgcctcagccctgcaaagtattgtcacctagttggcattataattgtgacttcaaaaggccattccaccgttctatcaatccagctgcttcaggaagatgggaacatggtaagacaagtgaattccatgagcatgagcccactgctgcacttctttagctgtaaagtgagtgcctttgtcagaggcaatgctgtgtggaataccatgatggtgaataaggcattccatgagcccatggatggtagtcttggtagaagcattgcttgcaggataggcaaacccatatctggagtaagtatctattccagtgaggtcaaaccacttccctttccatgatggaagaagtccaatataatcaacctgccaccaggtagctggctgatcaccccaatgaatggtgccatattgagggctcagtgttggtctctgccactggcaaattgggcactcagctgcggccatagccaggtcagccttggtgagtggaagtccatgttgctgagcccatgagtaacctccatcctgccaccatggccacttttttgacaggcctattgggtgatgacaggggtactgaggaaagaggctgactgctgtccacagaacgggtcatcgtatctatttgattattaaaattctcctctgctgaggtcatctataggtgagcactcacacaggatataaatgtcttcacagttttcgaccactcagagaggtccatccacatacatcttccccaaatttatttgtcactaattttccaatcatgcttccttcaagtccctgaccatccagccaaaccattggctacagcccatgaatcagtatataatcacacatctggccctttctccttccatgcaaggtacacaaccaggtgcactgcttaaagttctgcccactgggaagacttcctctcaccactgtccttcaaggatgtcttagaaaggggctgtagtgctgcagctgtccactttcaggtggtgcccacatatcatgcaaaaccatgtgtgaaccaggccctagtcttctcttcctttgtcaactgatcatgggcaacaacctatgaggccatcagtgcagggtgggagagagaaggcagggtggctggagtggagaccatgggcatttgagccactttccttatgtaacttacttgttgccttcaggacctacttgagcctgatcacgtatatataccacttccatttgatgatggaatgctgctgtgcactacccattttatggctaaacgggtcagaaagcacccagttcacgataggcagttcagctctcatggtgacttcatgacccatagtcaaatgttcagtttccaccaaaacccagtaacaggccaagagctgtctctcaaaaggagagtggttatctgcaggagacggcagggccttgatcctaaatcctagaggccttcactgtgattcacctatgggggcctgccaaaggctccaaacagtatccctatctgccactgacacctcaagcacgattgtatctgctgggtcatatggcccaagtggcagagcaacttgcacagcagcctgaaccagttacagagccttctcctgttctggaccccactcctggtatcaaaatctgtattagtcagggttctctagaggaacagaacgagagaataggtgtatatataaaggggagtttattaggtagtaataactcacacaatcacaacctcccacaataggtcatctgcaagctgaggagcaaggaagccagcctgagtcccaaagctgaagaaattggagtccaatgttcaagggcaggaagcattcagcacaggagaaatatatgtgctggaaggctaaaccagtctagcctttttatgtttttctgcctgctttatatcctggctaaactgacagctgattagatggtgtccacccaaattaagggtgggtctgcctttcccaacccactgcctcaaatgttaatctcctttggcagcaccatcatagacacacccaggatcaatactttgcatccttcagtccagtcaagttgatactctgtattaatcatcacagtatgtctaagaatgtgtcttcattcattgtgctgggaactcagtgcagtctttaattgcaagttaaaatcaccttggattttttatttgctaattttgtctacatcattttctttgtcatctctttgtggaattcttggtagcttattttcgtctcttagattatgcattttaaatattttctactttctgtttaatttatttatgtcttccaaagtgtctaccaaattgttttctagcaatattttagcaccatcaggattcagtaccttggacagttctctgggtgacgatgtaattcagggcaccaattagcatgctgagggccacagacatcaaaccagagtgagagaggagagagagtttgagtggaaaaaaaaataattgtttgtgagatcagaagacaatctcaagaactttcaaataaccatgagatatggggtaaagcagaaattctaatttgatgggcatctattatctatccagcactgttttctaggatttctccaccagcatctctgctccactacacaaacatacacacacacactccccaacatgactgatacagtttggctgtgtcttcactgaaatctcaacttgaattgtatctcccagaattcccacatgttgtaggagggacccaggaagaggtaattgaatcatggggcctggtctttcccatgctattctcgtgatagtgaataagtttcacgagatctgatgggtttatcaggggttgtcgcttttgcttcttcctcatttttctcttggcaccaccatgtgagaattgtctttcacctcccaccatgattctgaggcctcccctgccatgtggaactataagtccaatgaaacctctttttgttcccaattttgtgtatgtcttcatcagcagcatgaaaacagactaatacagtaaattgataccagtagagtagagcactgcagaaaagttacccaaaaatgtggaagcgattttggaactgggtaacaggcagaggttggaacattttggagaactcagaagaagacagaaaaatgtgggaaagtttggaacttcctagagacttgttgaagggctttgcccaaaatgctgatagtgatatgaacaataaaattcaggctgaggtattctcaaatggagatgaggaatttgttggaaactggagcaaaggtgactctagttatgttttagcaaagagactggtggtattttgcccctgccctagagatttgtgaaactttgaacttgagagagatgatttagggtaaccagtgaaagaaatttctgaacagcaaagcattcaagaggtaacttgggtgctgttaaaggcattcagttttataagggaagcagagcataaaagcttggaaaatttgcagcctgactatgtgatagaaaaagaaaaacccattttctatggagaaattcaagctagctgcagaaatttgcataaacaggaaggaacctaatgttaatccccaagactatggagaaaatgtctccaggccatgtcagagaacttcctggcagcctctcccaccacaggcctggaggactaggagaaaaaagtggttttgtgggctaggcccagggttcctatgctgtgtgcagcctagggattttgtcccgtgtcccagcagctccagccatggctgaaaggggccaatgtgcagctcaggctgtggcttcagagggtggaagccccaagccttggcagcttccacgtggtgttgagcatgcaggtgtgcagaagtcaagaactgaggtttgggaacctctgcctagatttcagaagatgtataaaaacccctggatgcccaggcaacagtttgctgcataggcagggctctcatggagaacctctgctagagcaatgcagaagggaaacatgaggtcagaggacccacacagagtccctactggggcactgcctagtggagctgtgagaagagggccaccatcctccagaccccagaatggtagatccactgacagcttacaccacaaacctggaaaagccatagacactcaatgccagcctgtgaaagcagccaaaagggagtctgtacactgcaaagccacagggatgaagctgcccaagaccatgggaacccacctcttgcatcagtgtgacatggatatgagacctggagtcaaaggagatcatcttggagatttaaaatttgatttccctgctggattttagacttgcatgggccctgtagcccttttgttttggccaaattctcccatttggaatggctgtatttacccaatacctgtaccccattgtatgtaggaagtaactagcttgcttttgattttacaggctcataggcagaaaggacttgccttgtctcagacaggactttgaactgtggacttttgggttaatgctgaaatgagttaagattttggggtactgttaggaaggcatggtaggttttgaaatgtgaggacacgagatttggaggggcaagaggtagaataatatggtttggctgtgtccctaccaaaatctcaacttgaatttatctcccagaattcccacatgttatgggagggacccagggggaggtaattgaatcatgggggccagtctttgccattctattctcatgatagaagtctcacaagatctgatgtgtttatcagggatttctgcttttgcttcttcctcatttttctcttgccgccatcatgtaagaagtgactttcacctctcgccatgattctgaggcctccccagccatgtggaactgtaattccaatgaaacctctttgggattgtctttatcagcagtatgaaaacagactaatacaatgactatgactcaataagttaccatgttcctcgagctctgcctcatcacactgttgacctcagttgattaattcagaggtgaatatctgaccaagacgagttcatcagttccctttccaatgattttttaaaataagctatttattttagaattattttagatttatggaatatctgtggagatagtgtacactacacccacaactaatttctcctgttattaatatcttacactattatggtacacttcttatagttaattaaccaatatttatatattaagataccccttttttgattaccttgatgcttttgagaagtattgatcaggtatttttgaaaagtccctcagttggaacttatctgacgtttctttcatggttagactggggttatgagttttgggaagaaagactatagagatcaactgtcattctcaacaaatcatatcaaggtactccactatcatcatgaattatcactgttgatgttaattttgatcaccttgctgaagtagtgtttgtcagctttcttcactataaagttattcttttcctccttcaataatgtagaatttgaaaggaagttgctatgtgcagcccacacttaaggagtgtggagttatgttccaccttcttaaggacctactatctacataaactttttgaaatttttctgcacaggagattttcctcatcttctccattcatttatttatttagtcatttatttgtattagcagggattcataaatatttattttatactttgggctataattcaatgatactttatttggttgctcaagttattctagctttggccacaggcagctcctgccccaaagatttttaaaattgtaataagaaaccaatcagcctctgtctctagatgactaaacctatttttatctaaaactcgaaagctgttggaaaccaatttttttctaccagagtataaatatgatggaaccaattatgcagagagaaaataatgtaaagtaagaagcccagaaaagaagcaaaagcacacacccttattccctcccaattctttagttagatccacatcctgggaagtcctgttgtcctattctgaggttttgtgtgccattccagtttctgcatacaaaatatctctttttctttaaattggatccatctattcaacctgaagagttcaaacagctacaagaagaaactgcattatttgggtggggacacaggcgaggagatttccagtagtggttattaatatcattcattgaaacctagagacccagggttcagttgcatttccgacagtccctggcttgttcctgccatccttggcactgcccaagaggcctctgatgatgactgccactgatatgctcagctctgtccacctctgggattaatgagatctttgtctgagttccctggcctgccagctcctcttctgttgctcccatcagttttacacctttcattcttcctatctccaccttgcctacccactccacccaactttctttttcctgtagtagttttactacaggatctgcttcaattcctggtggaaagtcacgttggtacttagtgtttggacagtatattatacattataatgacagtataagatttgtagacaaatatcattccactttaagagtaagttttaaggtagatattattccaatatctcgaattagaaaactagaaaatttcaaattagaaaactatcattcatactcattgagtcctctttcacatagtgaaagcgagtttcaaccaaggttttgactccaactactgtgctcattccacaatactataccgcatgcattaaaagagtgacaagttaagctgcattcttattctttggttgaaggaaatatctagtgaccttacgaggcagccttcttagtatagccaagaaaaccatcgggtctgtatgtgcaaccaacctaatgttcatatagatcatcattttaccgatatggtgaaggtaaattactccttttacatattacagtagttatgaggaagctaaaggaataatctgatttcatttctataaatgtatggggtaggacagcaattttgttacatccatagattgcatagtaatcaagtcaaggcttttagggtatctatcacctgaataacatacgctgtacctattgagtcatttttcatcatccactcccttcccaatccctcacccttccaagtcttcattgtctattatttcactctttatgctcatgtgtatacagttcttggctcctgcatatgagtgagaacatgtgatatttttcttgctgtgcctgacttgtttcacttaggataatgatctccagttccatccatgttgctgcaaaagacatgatttccttatttttaatggctgaacagtattccattgtgtgtatatataccacattttctttattcaataattcattgataaacacctaggttgattccaaatctttgctactgtgaacagtgttgtgataaacatatgagtgcaggtattttttggcatattaatttcttttcctttgggattaaatggtagttctattttcagctttttgagaaatctttatactgttttccatagagattgcactaatttacactgccagcaacagtgtataatagttcctttttctccacatcctcgccaacatctattgtttgtttttgagacaaggtcttgctgtgtcacccaggttggaatgcagtgtgtaatcacagcttactgcagcctccaactcctgggttcaagcaatcttcccacctcagcctcctgggtaactgggactacaggcacacgccactatgcttggcatttttttttttttttttttttttagaggcagggactcactatgttgaccaggctggtctcaaactcctggcctcaggtgatcctcccgcttcagcctcccaaagtcttgggattacaggagtaagccaccatgcccagtgctgttattttttgactttttagtaatagccattctgtctagggtaaaatgatatttcattgggattttaatttgcatttctctggtgattagtgatgttgagcattgtttcatacacctgttggccatttgtatgtcttcttttgaaaaatgtctgttcatgccctttgccactttttaatgtgattatttggggttttttgtgttgagttgtttgagtttcttgtatattctgtatattagtcgtctgtcagatgcatagtttgcaaatattttctcccattctacaggttgtctgttcaatctgttgattgtttcttttgttgtgcaaatgctttttagtttaattaggtcctgtttgtctattttgttattttgttggctgttattttgaggttttagtcatactttgcctagaccaacaagcagaagaattttccctatgtttccttcaagtatttttatagtttcagatcttacatttaagtctttggtccatcttgagttgatttttgtatatgatgagagagataagtctattttcacgtatctgcatatgaatattcaattttcctagcactatttattgaaaaggatgtcctttctccaatgtatgttcttatcagctttgctaaaaatcagttggctataaatatgtggctttatttctgggtttgctattttgtttcattgatctatgtgtctctcataccagtaccatagtgttttggttactatagccttgtaatgtaatttgaagtcaggtgatgtgatgcctccagctttgtttggttttttttttttttttagggttgctttggctgttcaggctcttttttagtttcatatgaactttaggatttttttttcctgattctgtgaaaatgacattggcattttgataggattccattgagtctgtagattgccttaggcagtatggtcattttaactacattaattcttccaattcatgagcatgggatgtttctccatttgtttttgtcatctacaatttcattcattagtgttttgtagttttctttgtagagatctttcacctccttggttaaatatatccctacatattttttcatagctaaggtgagtgggattgccttcttgatttctttttcagctagaacgttattgttgtataggaacactactgattatatgttgatcgtgtatactggaacaatcttattgattgttgttaatgatgtgtaataaccactgaaaacatgattccaactttatctttaaactataactcaaaacaatgatagatattttaagaattagaccgattttttgtcattggaagctaaaaatcagctttatctagaaggtgtaaaaaacactttagtacaaacctacctagattgggaaatttaccggaactcatttattcaatagttatgcatatttcaaataaagctgccatttttttttatttctgcttttataaactaccacaaacttagcagcttaaaacagcataagtttattatcttaccattgtggaggtcagaaatttaacatgggtctcactggactaaaatccagtgctgtgtctctttccggaggctctaggggaggattcatttcctcgctcattcagattgtcagcagaattcagttcttcgtgttgtaggacataaatctctatttctttactggctgtcagcgaggactttccatcttctagaggccatggcattccttagctcagggctcccttccccatttcaaaaccagtaatagtgggcagaggccttccaaagcctcaaatctctcttccttccatctcatcccccgacacagccaggaaaatttacccacttttaaggactcatacgattatgttgggcccacatagataatccaagataatacccccattttgacatctgttcctttcatcacaaccacaaagcctcctttgccatgtaaggtaatgtattcacatgttcaagacattcaggggtgggcatatttgggggctattattctgcctaccacagttaccataccactgcaactttcaaccacataaactattatagtaatttaaactcctcacattaatctgctgcattataataaacagcaatgccttaaatgtttttccccattttgaattttttcttaattttcttctcaagaaaaaatttgtgctgtgtccataaaatttagcaaacgaatatatacaataatttcattcacaatgaattttataaaccattttcatgaacaaatacatttaacaagttctatttgctttcttttcatttcctcatacaaccatccactgacttaatttgatttcatagagatttagggctgctttctctcttcttgaatgttgaaattatgctttcacagtagataggctttctgaggaataagaatcacttgtgcttttttctatgtgaggaaattagaattttcagcttcaccagagattatttcatccttgaacagtgactagttagctttcaataatgagatctgactcccactcaatctaaataaaacatttaaaatactacttaattaacaataaaatgatttttccagtaaccaatttcctagcaaatgcactatataaatatcaagttctccttttctctgccaatacttagcaacttaacttctgtattagaaaggtcagaagaaatgagagatgcaatttaaaatcagttggtattcctataaactttttaatagtgctggtaaagaatgggttctaatttataattataatatgtggtttaaacaatgcttctccttcttttttagctttttcctcaagtccatgaaaaggcctactaagtctaattacttatgcctctctttgttttcttctttcctattatcttaggcacaaccagcttcaaatatcacgtctatgcaggtaactcaagtccgtgttgccatactatcaaatgacctattttacattcctatcaaagatgcatttaaatacttcctattgactcaaaatcaaaatactgaaactttagtcattaatcccatgatcttcataattattgtccttaaaacactgaagagcgaaaacacaaaggggatagaaaaagaacttttcagtggaatgcctgagaaattaaaggatgtgacacatttgatcatgtggtgttgaaaagtgaatcgggatcatggggatcattgtggatgggaagcaggactagactgcagctctgactcagacagagcagtgtgtggaggcttgtatcatgaatttttgctccagaacaactacagtaataaaccaggaaaactgggaagatccacagaccccctgaagaaagcaaattgctcttgcaggacctgggagacaccctaaatattgtgagtgcccaaactgtggaagtgggaaagggagattgcctgcccccgaacacacaacccccactggggaaactgaaagtctagaatatgggagaagattttgaccttacctggagctgagtcaatttagagagctgagtgaaatacaggggtagtggaagcagcaggaaaagccctgggagttcactgggtcccctagcaagccacttttccctggcctcacaggggtccttcgtgggagcagccagagacactgggaagaggtcacaggaagaaggaaatctccagctgaactctgtaacaatttgaactcatcaagaagcttcctactttgggaagcccaggtgggcggatcacgaggtcaggagatggagaccatcctggctaacacactgaaaagaaatacaaaaaaattagccgggtgtggtagcgggcacctgtagtcccagctaatagggaggctgaggcagaagaatggtgtgaacccgggaggcggagcttgcagtggcccagatcactccactgcactccagcctgggtgacagggcaagactccatcagaaaaaaaaaaaaaaaaaaagcttcctggctagaactcaggggagggcatgaatccaatgtgcagactccacatgtggggtaagaaggaaagccatatttgcatttgcagctgggaggtgggtaacctggggcaagttatcagccatgctcacccactgcctacaaacagactcggtgctgttgggaaggggcaagatgggagagagaccagcccttcaaattttgtgtgggagctgggtgaggcctgtgactgccagctttcccctgcttccctgacaactcactactgtgcatgacacagtacagacagtcataatcctcctaggaacagaactccattgacctgggaacctcatcctcattccccacagcagctgaagcaagacccacccaggcagagtctgagctcagacatgcccagccctgcccccacacaattgtccttccctacccaacctggtaactgcagacaaagggccatatactcttgggagttctagggcccccacccaccacctgtttctctccatactaccacagctgatgctctctggaaagcaccacctcctggcaggaggccaaccagcacaaaaatagtgcaataaaccaacaaagccaagtaccctcgcagagcccattttactcccccaccacctccaccagagcatacgctggtatcaatggctgagagacccacagacggttcacatcacaggcctctatgcagacaacccccagtaccagcccagagcctggtagacttgctggatggctagatccaggagagagataacaatctccacagctcagctctcagtaaaccacatccctaagaaaagggggagagtactacatcaaggcaacaccccatgggacaaaagaatctgaacaacagccttcagccctagaccttccctctgacagagcctacccaaatgagaaggaaccagaaaaccaactctggtaatatgacaaaatgagattctttaacacctccaaaaaaatcacattagctcaccatcagtggactcaaaccatgtagaaatccccaatttacctgaaaaagaattcagaaggttaattattaagctaatcagggaggcaccagagaaaggtgaagcccaatctaaggaactacaaaaagtgatacaagaagtgaacacagaaatattcaaggaaataggtaacataaataaacaacaatcaaaacttcaggaaagaatggacacacttatagaaatgcaaaatactctggaaagtctcagcaagagaattgaacaagtagaagaaagaaattcagagctcaaagacagggtcttcgaattaacccaatccaacaaagacaaagataaaagcataagaaaatatgaacaaagcctccaagaagtctgggattatgttaaatgaccaaacctgagaataattcatgttcctgaagaacaggaacctaagaagagaaatctaaaagtctggaaaacatagttgggggaataattaagaaaaacttacccagccttgctagaagcctagacatccaaatacaagaagcacaaagaacacctggaaaattcatcacagaaagatcattgcctagccactttgtcatcaggttatctaaagttaagacaaagtgagaggtgaagccagctgaacttcctgggtcgagtggggacttggagaacttttctgtcttacaagaggattgtaaaatgcaccaattagcactctgtagctaggattgcaaaatgcaccaatcagtgctctgtggctagctacaggtttgtaaaatggatcaatcagcactctgtaaaatggaccaatcagcactctataaaatggaccaatcagcactctgtaaaatggaccaataagcaggacatgggtggggacaaataagggaataaaagctggccacccccagccagcagcagcaactttctcgggtccccttccatgctgtggaagctttgttcttttgttcttcacaataaatcttgctactgctcactctttgggtccatgccacctttaagagctgtaacactcaccacgaaggtccacggcttcattcttgaaatcagtgagaccaagaacccatcagaaggaaccaactctggacacaaaaggaaagaatcttaagagctgtgagacaaaatcaccaggtaacctataaaggaaaacctatcaggttaacagcagatttctcaacagaaaccctacaagctagaaggaattgaggccctattttaagcttcctcaaaaaaaaaaaaattatcatgtaggaattttgtatccagtgaaaactaagcttcatatatgaaggaaagatacagtctttttcagacaaacaaatgctgagataattcaacactaccaaaccaccactacaagaactgcttaaaggagctctaaatcttgaaacaaatcatggaaacacatcaaaacagaacctctttaaagcataaatctcacaggacctataaaacaaaaatacaattataaaaagaaaacaagacatacaggcaacaaatagcatgatgaatggaatgatacctcacatctcaatactaacattgaatgtaagtggcctaatgctccacttaaaagatacagaattgcagaatgaataagaattcaccaaaccatctgctgccttcaagagactcacctaacacataaggactcacataaacttaagataaagggatggaaaaagatattccatgcaaatggacaccaaaaatgagcaggagtagctattcttatatcaaacaaaacaaactttaaagcaacagaggttaaaaaagacaaagaggaacattatataatgattaaaagccttgtccaacaggaaaataccacaatcctaaacatacatgcacctaactctggagctcccaaatttataaaacaattactaatatacctaagaaatgagataggcaggaacacaataatagtgggagacttcaatactccactgacagcactacacaggtccagacagaaactcaacaaagaaacaaaggatttaagttacaccctggaacaaatggacttaacagatatatacagaacatttcatccaacaacggtagaatatacattctattcaacagtgcatggaactttctccaagatagacaatattatacacaatatatagacaatataaatttaggaaaattgaaattatatcaggcactctcagaccacagtggaataaaactggaaatcaactccaaaaggaaccttcaaaaccatgcaaatacatggaaattaaataacatgctcctgaatgatcactgggtcacaaatgaaatgaagatggaaatttaaaattttttctaactgaacgacaatagtgacacaacctaccaaaacctctgggacacagcaaaggcagtgctaagaggtaagtttatatccctaaaggcctacatcaaaaagtctgaaagagcacaaacacataatctaaggtcacacctcaaggaaccagaaaaacaaacttgaccttaggtaatctgcccacctcagcctcccaaagtgctgggattacacgcaattcctttccatatgattcgtcccatagggcaacatggcagctggcttcttccagaataaatgatgtgagagagagagaggagagagagagagaaggagaaagacagaatgcaaccacaaaaaaataaaataaaatttgttcaaatatattatgtggctcacagcctttgagcgggccagtgggttcatcctggaaatgccactggcaaaaaaagcacacgaatcagtagaacttcccccatagagatgtctcagatggcaaactgggtacagacgctaaaacagaatctttatcaccgattcccctaaaaacctgatgccaccatttgctttgccagaaaagaatggattctgcatgggatctgatcttcaacttctactgtttcatatcaacatcgtaagtgcctcactagtgaagcaattgcctatatcctaagtacaaaaagaggctggtaaaattaatttctggtatctatcttggggaggataacttcccaatataatatggaaatttttccaaactaaattagggtattccaaagattctgggcaataacaaagcccgagagtgtacactacccttgcccacttaggttcccaaagtcagccaattccctcttctatatttaaacttgtaaacagcagcaataaatttaagtactaagataatccactctctcgtctacaattgaaaatggatgcacctccccaatggagaatcaatttttaaatcatatatgtatatatgatgagatttataaacatacggatgacatagccatgtgtgtgtgtgtgtatatatacacagacacatgatctatggctattatccttagatctatatcatgatagagaataccatgacattctataatctgtggactaatttgtaaagctaaataatactagtacatcctacagaaaataggatatttgtgagaacaggatgtttgtagaatagttgttaaaggagaaaaaataattgagagagcaagagcacaaatcacaatagataatacagatctgcaagtgatcataaggctccgattgacaagttaagacaattcctccacatcttccagattcctctgttgtaagccagcagcttagctggcttgggttatttactgagtgaaataacccaaacttgtattcctaataaaagaattggagaccttggaacgtgcagtttacccttgatctttaccatctgatgtggcaatactgatagaaagccaagtgatctcttggttcaaggcacttttctcacactctcccagaatggtagctatcattccttttaataacaggctcatttaccctcagccaactttgcatcccttttttgtgcctagttacgcggtggcatgaaggatttaaaaatgggcaggtgtctctcttgaattttagttcaataatacttgcctcacgtggtaggtattattgttatgtcatcagctgaaatgttcctattcaggtgtgaaaatctcaatttcaaatccgtgtaagcatattttttatctggggacgggtgcatatttcagtctgtagatgtctctgggaagtctttttatttggttacaaaagctttcaaataagaattaattaagccagaattgggggaatcagagtaaactattgttaaaagataaaataggtggaacagtaagatatatcaatcttatttgcactcttgattctcagacccttgtattctgacttctggacaaatgtattttgactactgatttagagcatatggatgtatgatatcactccaaccttgcaagtattatcacctacatgatactctaattgagttttcaatagattcagttccataagaatatttttttcaggtggtgggtggaatatataataatatcaatgaatcttttacaattgaaagcctattgccttctttcattgttcgccgggcacagtggctcatgcctataatcccagcatttaggaggccaaggcaggaggatcacttgggcctaggagtttgagaccagtctgggaaacatagcaaaaccccatctctacaaaaaaatagaaaaattagctggacatggtgatgcacatctgtagtcccagctactcaaaaggctgaggtgggaggatcaggctgcagtaagccatgatgataccactacactcaaacctgggcaacagtgcaagaccttgtcaaaaaaaaaaagagagagagacaaacagaatgaaggaccaatagaatgtgtgtgtctgtgtgtgtgtgtgtgtatgtgtgcgtgtgtagagagagagagattttttataaggaattgattcacactattgtggaggcagagaaatcccagaatctagtcagcaagctggagacccagaagagccaatggttctagtctgagtttaaagaactgagaaccaggatagctgatggtgtaagtcacagtccaaaggtcaacagctcaagacccaagaagagctgatgcttctgttctagtctgaaggaagaaaaaggccaatgacccagttcaaaagtagtcaggcaggaggaaatcccccttactcaaggaagggtcagactttttgttctattcatacctacaaatgactgaatgaggcccatccacactgaggagagcaatctgctttactcagactactagtttaaatgctaacctcattcagaaatacccttcgagacacacccagaatgatgtttgaccaaatgtctgcatggcccagttgacacataaaattaaccatcataggtaccgtactaggaaaaaaacctcgtggcctgacagtggataggtgttataggtagaattataaggatgtcctccccaagattcctgtcccctgattattcaataatgcactaatttctaaaacttgtgaaatccaccaagcactgctgagaaaagactttgcaaaagaaattaattttattgatcaggtgaccttaaaatagcaagatttttctggattacttgggctcagtgtaattatattagctcttaaaagcagaggagggaggcagaaaagtcagtagaggagatgtgacagaagaccagtattagagaaataaggcagagaggcttgaagtatgagaaggactcaaaccaccattgttgactttgacagaggccacaagccagggaacgtgaacaacctctagaagctgagaatgacccagctgacagccagtaaagaaatggggacctcagtcctacaagagcttgaaactaaattctgccaacaacctgaatgagtatggaagtagattctctcctagagcctccagaaagtagcacatccctgtcaacaacttgatttcagccttggaagactaagtggagaaccaacagaaccatgctgtgcatggacttctaacccaaagaaactctgagataatcaacagccactaaacgtatggtaagttgttacggcattgacagaaggttaacacaattaggcattcggtaagtccccagatagtgctgctacagaagcacagtcatgaaagaaggcaagtagaaatacaaaatacattcttgagtctaccaggaaagtgttattttctcttgtatgttgctctgtgcccagtgaaatcaacaaagtggcttcctggtgtcttagaaacataacggcatattgccattcagagtcagttaatgctgttggcaaattgggcactcatccatgacggttgccatgtcagctatggtatgaggaagttgattttgttgaaccatgcatattttatgcctcttggatatagtttctgtgttatcttgtatatgattaagtgcattaagcaagcactggggcaatatggtttggatctgtgtccccactcaaatctcatatccagttgtaatccccagtgttgaaggtggggcctggtgggaggtgactggatcatgggggtgaatccttcatgaatggtttaacaccaatcctttggtgttgttctcatgataaaggagtcacgagatctggttgtttaaaagtgtgtggcacttatccacctctgtctcttgctcgtgctctggccgtgtaagatgttcaagacattcctgcttctcctctaccttccgccatgattaaaagtttcctgaggcctccccagaagccaagcagaaggctctatgcttcctgtacagcctgtggaaccaagagccaattaaacctattttctttataaatcacccagtctcaggtatttcgttatagcaatgcaagaactgactaatacatggagtaactagaagaagggcagaaaagaacaagtccccttgtctacttgatcactgacagcctcttctgtagtgggtcacctctcataagcatacacatggggtgcaaatattctgacatctggcaaaagatgcatctaagtactcaagcacacttgtcaccaatccttcaaagttattccatcaaagtctctgaaaacataatagatatggatccactttctcaggccacttctccttccaggtaaattggacattgctctatgttttgcccactaggaggctttctcttcccagccctccctcagggccacctcttaggtctacagttgggccagagtccagttctggttcatgtgtagccaccagtaaagaggctccttttatttttatttttatttatttattttttttgagacagagtttcactcttgttgcccaggctggagtgcaatggcgcaatctcggctcacgggttcaagcgattctcctgcctcagcctccagagtagctgggattacaggcttgcacccccacacccgggtaattctgtatttttaatagagagggggtttctccatgttggtcaggctcatctcgaactcccgacctcaggtgatccgccggcctcagcctcccaaagtgctaggattacaggtgtgagccaccacgccctgccaaggctccttctttttcttcctaattaactcatctaaggaaacttcctctgcaatcataggcaagagtttagcagagatgtggctgtacagcaaaagttggcatcttgggagtgagaactacctgcttagtcaactagatttggttttttggagctaaaatataccatttcaatttcatgttaaagggccgctgaaccactctagtttatggcttagtttcagatattacctagtctttgatgggcagtacagatcctatgaacacctagagcaccatagccaggaatttaatctctagtagaaaaaaaacaagaactgcttctcaaataaaacagtccaagagccaggcgcagtggctcacacttgtaatcccagtgctttgagagtcagaggcaggaggataacctgagaccaggagttcaagaccagtctggacaatgtagtcccccatctctacgaaatatttttgcaggaggattgcttgagcccaggagttcaaggctgcagtaagtcatgatcacaccactacacaccagtctgggcaacagagttggagtgtctctgtttcaaaaaaacagaaattaaaaaaaaaaaaaaaaaaaagcccgggcgcagtggctgactcctgaaatcccaacactttgggaggccaaggtgggcagatcacgaggtcaggagatcgagaccatcctggctaacacagtgagaccccgtctctactaaaatatacaaaaaattagctgggcatggtggcgggtgcctgtagtctcagctgctcaggaggctgaggtgggagaatggcgtgaacccgagaggcggagcttgcagtgagccaagatcatgcactgccctgcagcctgggcaacagagcgagactctgtctcagggaaaaaaaaaaaaaaaaagtcaaagagagcatgattttgctacaaatttctattattaagtgcctctatataatttcccaattagagcctgccttagacttcatacagcatccagatctgccatagacatttgaatctacagaggcatgaagaatacatgacagatcccctggtccagctaaagaggtgtctcttccagagcctgctctgagttggctggcagcctttcaggacacttagttaaaggtttggaatagatgtacagtccccttctaaaatccatagaagacctctaaacattgtgctgcttttttggtacaggagtggaggaagaaaatatagacattgaaaaacagacagaaccagatggtttttgttcatgtctatgctctatccaggaaagatttccatcttacagatctgagaacaaaattaaaatttttttaaagcacactatctgaaaatttaacctggaattaatctgtggaagggagaaataagcaggaaaaaaaatggtttaatgtaagaaaaaggagcctaataatacccattctgcaagttattttaccttattcattaattatttaatctaatatttaatcccctgcacttttgaaaaatacagagattaataaggcacctgtgcaaaaatgactcaaactcataaaacatttcatatttttccaatacctatcagggtatgtggctgtttttacaatctcaagaattgtttctttgaatgactgataagatcattctaaaagaatctcacatcattgctaatatgatagagcagaaatagtctgaactttggaaccagaagacatctagatccaaatcttaccttgaacccttaccagctttgtgacccgggggaaattagttaggcactgtcataggctgaataatggccccccaaagatgtccacatcctaatccccagaacctgtgaatgtgttattttacatagcaaaagggactttatagatgtcattaagtcagggatcttgagatggggatatagtattatcctggatcatccagataagttcagtataattacacaggtccttaaaggaaggtaggatggtcagagtcaaagacagagccgtgatgatggaagcagagattggaggaacacagccctactgaaacattgatttttgaacttctgccttccagaatggtaagagaatagattttaaattttgtcattttaagccactaaaattgtggtgatttgttatttcagtaatagaaaactgatccaggcacttcaaagctcagtttcctcctgggaaaaatgggaataacacatttgtactatgaagattaaaaatatttttaggctggatgcagtagcctgtacctgtacctgtaatcccagcactttgggaggtcaaggtgggaggattgcttgaggccaccagttcaagaccagcctgggcaacatagtgagacccccatctctgcaaaaattttaaaaattcagcctggtgtggtggtacattcctgtggtcccagctactcaggaggccgaggtgggaggatcacttgagcccagggatttgaggctgcagtgagttacgatcatgccactgcactccagcctgggcaacagcatgacaacctctgtcaataataataataataattttaaagcagtcatcacatagtaactactcaataagaggcatctattaaaaacatttactgtactgtcagagatgcagtcagattgacagatgtttctttccaggctttacaatttactaattctagattttctcacttgcaaaatagagttaagaatagagtcatatcataaaattgttgcgaggattaactgaaatatttcacataaaaatcttagccccatgtctggaacaaggttagcatatcacataataaatattggctggccgggcacagtggctcatgcctgtaatcccagcactttgggaggccgaggcaggcagttcacctgaggtcaggagttcgagaccagcctgaccaacatggagaagccctgtctctactaaaaatacaaaattagccaggcacagtgacgcatgcctgtaatcccagctactcgggaggctgaggcagagaatcgcttgaacccgggaagcagaagttgtggtgagccaaaattgcaccattgcactccagcctgggcaacaagagtgaaactctgtctcaaaaataaataaataaataaataaataaataaataaataaataaataaatgttggctgcaactactactgcaactcctgctactactgtttgttttagcaatttcacgctgaagcactcaaaaactgtctctgtaatttaaaaagttgtccctgtaatttcctgccaccagatcactatatctttccatggttactcactctgatcttcaaaggctgaagtctgccctgggcttaaaatggtggctttatcctgagctcaccaagatttaaccttaaccattaatttccttcattctattcccccaaaaaaatctctattaaaaataactaagctaggctttagtcaacattaacaaatactaaaagcaataatgtttttagctgtagtgaaccaaacccttaagatgcaattactagacaaccccactgtgaagtcaaaaaaaataagataaaatttcatcttttcttccttgtcctaagtatttcattatgagcttattgtcagttgagccttattcacaaacatttcttcttgacctttagataattgaaaacacatattccaggcctcgtatcttgagaaatcattatggatatgttaaacagcaactgtttcagtacctcttttgtcatgcataagcttttaattataaattaaatataaaatataatatgaaatatacatcaaaatcttcgacattcataggcataacttattaccagttttgaagtacttaggaagtgagaaatcaaaaaaaaggaagtcagtttctgattttcattgatttcttctgataatatgttcatgaacatcataataattgtcaccatgaaaaatcagaaaaaagaaaagaacatgcagcttatgtggaaacttggttcatttcccattttgggtagaagactgtattagtttgtactcacactgctaataaagacatacctgagactaggtaatcaataaagaaaaagaggtttaatggattcacagtttcatgtggctggggaggcctcacaattatggtgaaaggtgaaacaggaacaaaggcacatcttacatggcagtaggcaaaagagcgtgtgcaggggaactcccccttccaaaaccatcagatctcatgagagtaattcacgatcatgagaacagcatgagaaaaacccaagcccatgattcaatcacctcccaccaggtccctcccatggcaggtggggattatggaatctacaattcaagatgagatttgggtggggacacagccaaaccgtatcaaagactaaggtgcgtgtattcacaatatttacatttgtacttgctatagtctgaatgtttgtgtccccccagagttcatatgttgaaactcaatctccagtgcaatggtgtcgggaggtgagacctttgggaagcgattaggttatgaggtcagagctctcataagtgggattagtctcccgggcccttacataaaaggcccaggagagtttgtctcttttaccatgtaaggaaacaactagaagtcgccatcttgaagcagagagcaagccctcaccagacactgaatctgctggcaccttgatcttgaacttccagcctccagaactggggtcaacaaatttctgtcatttataaattacccagcctaatatatcttgttatagcaacacaaactaagacagtaatcatgcacaccaaatgactcagtcaacataacatagcaaattgatcttctataaactaaacttgaattggagcatatatgtaatgtgttacccaaaccacgatacttttgagagccctaaggggacactgttaataattttagtatgttaagaaatagatgtaggctgggcatggtggctcatgcctgtaatcccagcactttgagaggctgaggcgggcggatcacaatatcgagagatagagaccatcctggctaacacagtgaaaccccgtctctactaaaaacaaaaaaaaaattagctgggcatgatggctgcctcctgtagtcccagctactctgggggttgaggcaggagaatggcatgaacccgggaggcagagcttgcagtgagccaagattgtgccactgcactccagcctgggtgacagagcgagactccgtctcaaaaaaacaaaaaaaaaagatgtaaactggttctatcctggacagcctgaacatgtcatcaatgtggtcatcattgttggatggatgcagctatcactctggttgtggggagtagagaggaaggaagaaggcaccagcactgtgccgtcttaaagaaagctgactctgcctctatctttcccatcccctttagctgatgtcaaaatgtcctttaaagggtcacttgcctctctgggtttcaggctaccttagaagatagaaaaaggaaccagactttgtatatgcattgtcattattcccactccccatgattatcatttttcacactctatgttctgatgtaatttcatgcacatttattagtcggcagactttacttaagcacctattacatgccaggtacatttcaagataagaattcttgtggagcagcaaatgatatagcagagacagactgaaacctgagcattcataatactctcaagttagcatcgtctttgttatataacataggtaggggttgggacatgtgtgaacaaggtgaaatgatagcaagtgagaaggagtgtctaatgagctgggcacagtggctcatgcctgtaatcccagcactttgggaggctcaggcagctggatcacctgaagtcaggagttcgagaccagcctgaccaacatggtgagaccccatctccagtaaaaaaaaaaaaaaaaaaatcaaaattaactgggcgtggtggcacatgtttgtaatcccagctactcaggaggcaaggctggagaatctcttgaacccaggaagtggaggttgctgtgagctaatattgcaccattgcactccagcctgggcaacaagagtgaaactgcaccagaaaaaaaaaaaaaaactaatgaaggaaaagaagcctttaagagggtgtacccttgaatgatgcaccaaccccctagacattctagcaagaagaacaaagtaaaaggggccagaaacttgaaaatctggtgctgaagaaacctatgagcattttgatgtaaagtatacagtgctactgatgcaacagtgagagtggagtggacacgaaggctttggaagaatcgtgaaggatcttgtctgccaagctaaaaagcttagattataacctatgtggaaagggaatcacagaggtgattacacacagcagagcatgattcggtttatctaccaggaaattattctgagtcagtattgggatccattagaagaaggtgaacagacccagtgggaactgcaaagcagtgactgcactgtctaaaaaagtcagcagtcctcagccctggatgaacatgagaacaacaacctggaaacaatattgggcttcatccccagaggttctggtttggttggcctgaggtgggcccagaaatagatatatttagttcaggtacatatgtgtgtatttgtgtatatataagtgtgtgtgtatacatatgtgtgtgtatatgtgcatagaaataaagatcaggaaagttttaatgccctactagtgttgagagccactgagataggaaagggcttaaactagatttaggagaagtggtaggtatgagagattggagctaaaaatcaatagaatgagacaattagaaggatagcaaagaggtgaggttatagggatgcacgtgaaacttagatacagcctagttttctgacttagacaactgtattgattttgatgatattaaactgccccagacaatgtttcagaagatttcacccaaggaacaaaatgtttctccaaaaacaaaaaaaacaagcaagtacaattttaacaggaaaactaatgactctgtcctctgcttggtgggaaaacagaaatttggaagatgctgacattttccatttttgatgttaaagatgtattaccttcatagtctctgggttttttgtgggggcggtgggcgagatcaaaagaagattcctttggtgatatccatgtacagcattccccaaatttccctcacccctccccaaagaagatgctacaggctgacaagttcagcatgtatttggcagcgcttgtaacagaatgctttcatttttgtttagtaataatttttaagaggagtgtgcaagatgctgaatggtatcttctctcttatccagatttgacagctgaggaaccacagctgaagacaaaagctctgacactaaagggacacaatgcccatctttttcacgtatttccaaatgttttgtaatttctttgacaagcagaacagtattctggtttcccctacacatcatcctttgatatgaagaaatgggcaggagaaagacagtggagctgaagaaaggagtaataatttaaatagtgcttactacatgccaaacactgttctaaacaaatttcattctattctcctaacagccctttgaagtagggactattattattcatattattcataagaaaacagaggcatagggacgttaagtaacatgcccaaggccacacagttagtaaatagcagagctgagctttggactccacgaagtccaaactgttaaccactatccagggcagctgcatcccctcctttgggtttaaagaatatgtttccataagacaagtggatactatatgatagagtttggatgtgtgtcctcacccaaatctcatgttgaaaggtaatccccaatgttggaaatggggcctggtggaaggtgtttgggtcatgagggtgggtccctcatgacttgtgatagtgagtcatttctcatgcaacctggttgtttaaaagtgtgacacccctcatgccagtaatcccagcactttgggaggccaaggcaggcagatcagctgaggtcaggagtttgagaccagcctggccaacatgatgaaaccccatctctattaaaactagaaaaactagcgggccatggtggcaggtgcctaatcccagatactcaggaggctgaagcaggagaatcgtttgaaccctggaggttctggctgcagcgagccaagatcatgccactgcacccagtctgggcgacagagccagactccatctcaaaaaaaaaaagcgtggcacccacccacccctgcccgcctcttgctccaactcctgccacgtgacatacctgattttccttcaccttccaccataagtttcctgagtcctacctagaagcagaagctagcaatatgtttcccgtatagcctgcagaaacgagagacaattaagcctctttttgtgtaaattagccagtctgagctatttctttatagcaatgcaaaaacagcgtagtacactataaaagctgtccagtggttaaaccattttaccagtgcccaacaagagcactcctcataaagcatctgtttagagaaggaaccaatgaaaagagaaaggctgaagacctaggagaggaaaaaaattgatggaagaaggttctggagaaagtgggacaagttgaggcttccgtagcccaaatgaaaatatatatatatgtgtgtgtgtatatatatatacacgtgtatatatatacacgtatatacgtatatatatatatacatgtatatatatatatatctttttttccagagaaaaagacagagataagcatgcagataactttttaattatttttttgtcactctgtccccaggctggactgcagtggcacaattatggctccctgcagcctcaacctcccagactcaagtgatcctcccacctcagcctcgcaagccaggaccacaagtgtgcgccaccacacctggctaattttttattttttgtagagatgggatcttgctatgttgcctaggctggttttgaactcctgggctcaagcgatcctcccaccaaggcctcccaaagtgctgggattagaggtgtaagccactacacccagcccaggtaacttttagacatgtgttgggaactcaggcttaccacacctgatgaagtaggaagcaaagcctgtgctcagagtggaaaaccaggagtggcccggccgtgatggcagtttggggtttccacctagaggttgctaaacaggcttagcagcatcacagagagaactggtcacatggcttgtagccacatagtttgagccccactgcaaaatgaaaagcaaagttccttactgataaattattaagaatttcaaaacaacgaaggcacagcagtgaaacaattataagcacaaggtccttccccatgtggagcctcgtgagactacacaggtcacatggccatgaagctggccctgatgagaagtcacaggtaaaaatattctataaatatatgctggtggcaggaattagagtatgccactccaaaatataccactttatcataaggattattttgagctgaagataattaagcaatagcaggtgcaggaaaagctctctgccttcctcctttctgtctaaaagcagggtgtaaatttccctttgtaaaggcaatgtaaatatccatttataaaagtgtctccccctcccacaccaggaagagaaggatgctgttaatcaccagagacaactcttatcaatggagaaggcaacaactggagcctgtgtaacaactcttgctaaataactctgctgtggtctgaaagtttttgtccccccaaaatttatctgttgaaattcaaattcctaaggtgatggtgttagattattaggtcatgaggtcggatccctcatgaatggaaataatgcccttacaaggaaaccccagaaagcgcattcactctttcctccacgtgaggttacagtgagaaaacagccattgttaaccaggacgtgagccttcaccagacatcaaatctgccagcaccttgatcttaaacttctcagcctccggaactgtaagaataaattgctgttgtttataagctacccagtttatggcatttttgttataacagcccaaacaggctaagacaacccttatcttccatcaatttcccttatatatttacctctccaaaatttaactcccttagaaaactaagccccctgttcctttgtctaattacttctccatgatttattactctttgtaaaaatgacatagaacctcccatgtctaaccagttctttgggttttctcttctcttctgtgaagccatgcatgtttacatgtaacaaaccttctctcctgttaagctgtcttctgtcactttaatttacagagcctcattcagtgaacctaagaaaacagaaaaaaaaaaaaaaaagcattcccacgctggcatcacataccagatttctgattcactctgctacttctaaccaaaatctttctctatgaggaagaagagaaacaggtagtgactaatttcctctaatcacatgcagttttccatctcttcattttgtagctaagtgaaacaattattctcctctttccataatggagaatattgatcttatttctcagcaagccttgctcattatgccaaattcttttgtcaaattactttatagtaataatatcagataaattatcagcttgaaaattgactctacttcttaaaacagagaccacattttttaacaaaacaaaattatttcattgaggagattagagaatatcattataggacaatagagaaaagttattcctgtaaaggaattctgaaactagccaattttatttgtccacatagaggctgaaggagtttcaagttacagtgtttaaatatttcagaacagtttttaaattatatcttgatttcagaaaattaaaatttaatcaaggtgtttccttccagtatctcactttcttcccccaaattttagtgtttttcaactagagccctgtttcaattattaatcagaaatatttgttttaaaactaatgagataattacatatttgcttaaatacttaagcaacctgacttgtgtatataactcttataattattttcattgctcatgaactctcaagatactgagtgtacctgccggttatgttttcaaatacgtttgtattagactagctgaaactattttaacaatgtttgtagagattttgtggcagccagaatgcacctgaagaaacatttttaagatagataaaattgtacagagaaaaagaagcaggtagtatcttctagtcctccctctcaagaaaatttactagcacaaatgtaccatttgcaaaaatctgttgatgtaaactagaacactttggttgtacctcattttttcccctggaactgtaaaacagtcgatggagttaagcttggatcaaactttgagcctgcaaattattatgactatgctttgaacaatctgtcaaaatctctgagtctgtttcttcattggtgcaataaaagttataatttctgaaatgattatagaagcaccttagaaaattgaaagcattatgaaaaaagaagaagaagaagaagaagaagctgctgctattcatgtcactctatgttctaacactaacttcattataatgaagggagtggacttagacatataacctccctgagccacagttttcagtaataataagtacataataacggtaataataataacaacaataacacctacagggtttagatgaagatcaaatgagattatatcaactgttaatatgcagttagacaaatggatggatagagaaagagacagacagacaatagaaatatgctgtgggaacatactttgtcctctcagaagtccccagtgtaatagaagacataatgtagatacataaataatcgtagcatgtggaaggctataactgtcaaaaaagtcatatattagaacacttctgatttcttcttagccattcaaacattgtgttctgaccaattttgtcttcagaaaaagaaatattaccagtcatcattgttagacaaaagcaggaccagctacaaaatttgtgggacctggtactaataaaaatgcagatctccttgttaaaatgattagcagtttcaaaacagtgacagttgagcactaagccaagtgcagggaccctttaaacacagaacactgtaggtatcgtgattgaagatcaaattattgaaataaagtgagaagacaagatcagagaaaaaaagtaagaagaaatgaacaaagcctccaagaaacatgggactatgtgaaaagaccaaatctacgtttgattggcatacctaaaagtgatggggagaatggaaccaagttggaaaacactctttaggatactatccaggagaacttccccaacctagcaaggcaggccaacattcaaattcaggaaatacagagaacaccacaaagatactcctcaaaaagagcaaccacaagacacataatcatcagattcaccaaggttgaaatgaggggaaaaatgttaagggcagccagagagaaaggtcaggttaccaacaaagggaagcccatcagactaacagtggatctctctgcaggaactccacaagccagaagagagtgggggccaatattcaacattcttaaagaaaacaattttcaacccagaatttcatatccagccaagataagcttcgtaagtgaaggagaaataaaatcctttacagacaagcaaatgctgagagattttgtcaccaccaggcctgtcttataagagctcctgaaggaagcactaaacatggaaaggaacaaccggtaccagccactgcaaaaacatgccaaattgtaaagaccatcaatgctataaagaaactgcatcaattaacgggcaaaataaccagctaacatgataatgacaggatcaaattcacaaataacattattaaccttaaatgtaaacgggctaaatgcccccagttaaaagacacagaccggcaaattggatagagtcaagacccgtcagtgtgctgtgtttgggagatccatctcacatgcagagactcacataggctaaaaacaaagggatggaggaagatctaccaagcaaatggaaagcaaaaaaaagcaggagttgcaatcctagtctctgataaaacagactttaaacaaacaaagatcaaaggagacaaagaaggccattacataatggtaaagggatcaattcaataagaagagctaactatcctaaatatatatgcacccaatacaggagcaccgagatttataaagcaagtccttagagacctacaaagagacacacaataataatgggagactttaacaccccactgtcaatattagacagatcaacgagacagaagattaacaaggatatccaggacttgaactcagctctggaccaagcggacctaatagacacctatagaactctccacccaaaatcaacagaatatacatttttctcagcaccacatcacacttattctaaaattgaccacataattggaagtaagcactcctcagcaaatgtaaaagaacagaaatcacaacaaactgtctctcagaccacagtgcaatcaaattagaactcagaattaagaaactcactcaaaaccacacaactacatggaaactgaacaacctgctcctgaatgactactgggaaaataacaaaatgaaggcagaaataaagatgttctttgaaaccagtgagaacaaagacacaacataccagaatctctgggatgcatttaaagtagtctgtagagggaaatttttggcactaaatgcccacaagagaaagcaggaaagatctaaatcaacaccctaacatcacaactaaaagactagagaagcaagagcaaacatgttcaaaggctagcagaaggcaagaaataactaagatcagagcagaactgaaagagacagagacacaaacaacccttcaaaaaatcagtgaatccaggagctggttttttgaaaagaccaacaaaattgatagactgccagcaagactaataaagaagaaaagagagaagaatcaaataaacgcaataaaaaaaagataaaggggatgtcaccaccaatcccacagaaatacaaactaccatcagagaatactataaacacctctacgcaaataaactagaaaatctagaagaaatggataaactcctggacacaaacaccctcccaaaactaaaccaggaagaagtttaatctccgaatagactaataacatgatctgaaattgaggcaataattaatagtctaccaaccaaaaaaagtccaggaccggacagattcacaaacgaattctaccagaggtacaaagaggaactggtacgattccttctgaaacaattccaaacaatagaaaaagagggaatcctgcctaactcattttatgaggccagcatcatcctgataccaaagcctggcagagacacaacaaaaaaagagaattttagaccaatatccctgacgaacattcatgtgaaaatcctcaataaaataccagcaaaccaaatccagcagcacatcaaaaagcttatccatcacgatcaagttggcttaatccctgggatgcaaggcttgttcaacatatgcaaatcaataaacataatccatcacataaacaaaaccaatgacaaaaacgacatgattatctcaatagatgcagaaaaggtcttagataaaattcaacagcacttcatgctaaaaactctcaataaactaggtattgggcttccggggggaggagccaagatggccgaataggaacagctctggtctacagctcccagcgtgagcgacgcagaagacgggtgatttctgcatttccatctgaggtaccgggttcacctcactagggagtgccaggcagtgggcgcaggccagtgggtgcgcgcaccgtgggcgagccgaagcagggcgaggcattgcctcacctgggaagcgccaggggtcagggagttccctttccgagtcaaggaaaggggtgaccgacgcacctagaaaatcgggtcactcccacccgaatattgcgcttttcagaccggcttaaaaaatggcgcaccacgagactatatcccacacctggcttggagggtcctacgcccacggaatctcactgattgctagcacagcagtctgagatcaaactgcaaggcggcagcgaggctgggggatgggcgcccgccattgcccaggcttgcttaggtaaacaaagcagccgggaagctcgaactgggtggagcccaccacagctcaagaaggcctgcctgcctctgtaggctccacctctgggggcagggcacagacaaacaaaaagacagcagtaacctctgcagacttaaatgtccctgtctgacagctttgaagagagcagtggttctcccagcacacagctggagatctgaaaacgggcagactgcctcctcaagtgggtccctgacccttgacccccgagcagcctaactgggaggcaccccccagcaggggcacactgacactcacacggcagggtattccaacagacctgcagctgagggtcctgtctgttagaaggaaaactaacaaacagaaaggacacccacaccgaaaacccatctatacatcaccatcatcaaaggccaaaagtagataaaaccacaaagatgaggaaaaaacagaacagaaaaactggaaactctaaaacgcagagcgcctctcctcctccaaaggaatgcagttcctcaccagcaacggaacaaagctggatggagaatgattctgacgagctgagagaagaaggcttcagacgatcaaattactctgagctatgggaggacattcaaaccaaaggcaaagaagttgaaaactttgaaaaaaatttagaagaatgtataactagaataaccaatacagagaagtgcttaaaggagctgatggagctgaaaaccaaggctcgagaactacatgaagaatgcagaagcctcaggagccgatgcgatcaactggaagaaagggtatcagcaatggaagatgaaatgaatgaaatgaagcgagaagggaagtttagagaaaaaagaataaaaagaaatgagcaaagcctccaagaaatatgggactatgtgaaaagaccaaatctacatctgattggtgtacctgaaagtgatgcagagaatggaaccaagttggaaaacactctgcaggatattatccaggagaacttccccaatctagcaaggcaggccaacgttcagattcaggaaatacagagaacgccacaaagatactcctcgagaagagcaactccaagacacataattgtcagattcaccaaagttgaaatgaaggaaaaaatgttaagggcagccagagagaaaggtcgggttaccctcaaagggaagcccatcagactaacagcggatctctcggcagaaaccctacaagccagaagagagtgggggccaatattcaacattcttaaagaaaagaattttcaacccagaatttcatatccagccaaactaagcttcataagtgaaggagaaataaaatactttacagacaagcaaatgctgagagattttgtcaccaccaggcctgccctaaaagagctcttgaaggaagcgctaaacatggaaaggaacaaccagtaccagccgctgcaaaatcatgccaaaatgtaaggaccatcgagactaggaagaaactgcatcaactaacgagcaaaatcaccagctaacatcataatgacaggaccaaattcacacataacaatattaactttaaatgtacatggactaaatgctccaattaaaagacacagactgccaagttggataaagagtcaagacccatcagtgtgctgtattcaggaaacccatctcacgtgcagagacacacataggctcaaaacaaagggatggaggaagatctaccaagcaaatggaaaacaaaaaaaggcaggggttgcaatcctagtctctgataaaacagactttaaaccaacaaagatcaaaagagacaaagaaggccattacataatggtaaagggatcaattcaacaagaggagctaactatcctaaatatatatgcacccagtacaggagcacccagattcataaagcaagtcctgagtgacctacaaagagacttagactcccacacattaataatgggagactttaacaccccactgtcaacattagacagatcaacgagacagaaagtcaacaaggatacccaggaattgaactcagctctgcaccaagtggacctaatagacatctacagaactctccaccccaaatcaacagaatatacatttttttcagcaccacaccacacctattccaaaattgaccacatagttggaagtaaagctctcctcagcaaatgtaaaagaacagaaattataacaaactatctctcagaccacagtgcaatcaaactagaactcaggattaagaatctcactcaaagcccctcaactacatggaaactgaacaacctgctcctgaatgactactgggtacataacgaaatgaaggcagaaataaagatgttctttgaaaccaacgagaacaaagacacaacataccagaatctctgggacgcattcaaagcagtgtgtagagggaaatttataacactaaatgcccacaagagaaagcaggaaagatccaaaattgacaccctaacatcacattaaaagaactagaaaagcaagagcaaacacattcaaaagctagcagaaggcaagaaataactaaaatcagagaagaactgaaggaaatagagacacaaaaaacccttcaaaaaatcaatgaacccatgagttggttttttgaaaggatcaacaaaattgatagaccgctagcaagactaataaagaaaaaaagagagaagaatcaaatagacacaataaaaaatgataaaggggatatcaccactgatcccacagaaatacaaactaccatcagagaatactacaaacacctctacgcaaataaactagaaaatctagaagaaatggatacattccttgacacatacactctcccaagactaaaccaggaagaagttgaatctctgaatagacaaataacaggagctgaaattgtggcaataatcaatagtttaccaaccaaaaagagtccaggaccagatggattcacagccgaattctaccagaggtacaaggaggaactggtaccattccttctgaaactattccaatcaatagaaaaagagggaatcctccctaactcattttatgaggccaccatcattctgataccaaagccaggcagagacacaaccaaaaaagagaattttagaccaatatccttgatgaacattgatgcaaaaatcctcaataaaatactagcaaaccaaatccagcagcacatcaaaaagcttatccaccatgatcaagtgggcttcatccctgggatgcaaggctggttcaatatatgcaaatcaataaatgtaatccagcatataaacagagccaaagacaaaaaccacatgattatctcaatagatgcagaaaaagcctttgacaaaattcaacaacccttcatgctaaaaactctcgataaattaggtattgatgggacgtatttcaaaataataagagctatctatgacaaacccacagccaatatcataccgaatgggcaaaaactggaagcattccctttgaaaactggcacaagacagggatgccctctctcaccactcctattcagcatagtgttggaagttctggccagggcaatcaggcaggagaaggaaataaagggtattcaattaggaaaagaggaagtcaaattgtccctgtttgcagacgacatgattgtatatctagaaaaccccatcgtctcagcccaaaatctccttaggctgataagcaacttcagcaaagtctcaggatacaaaatcaatgtacaaaaatcacaagcattcctatacaccaacaacagacaaacagagagccaaatcatgagtgaactcccattcacaattgcttcaaagagaataaaatacctaggaatccaacttacaagggatgtgaaggacctcttcaaggagaactacaaaccactgctcaaggaaataaaagaggatacaaacaaatggaagaacattccatgctcatgggtaggaagaatcaatatcgtgaaaatggccatactgcccaaggtaatttacagattcaatgccatccccctcaagctaccaatgactgtcttcacagaattggaaaaaactactttaaagttcatatggaaccaaaaaagagcctgcatcgccaagtcaatcctaagccaaaagaacaaagctggaggcatcacactacctgacttcaaactatactacaaggctacagtaaccaaaacagcatggtactggtaccaaaacagagatatagatcaatggaacagaacagagccctcagaaataacgccgcatacctacaactatctgatccttgacaaacctgagaaaaacaagcaatggggaaaggattccctatttaataaatggtgctgggaaaactgcctagccatatgtagaaagctgaaactggatcccttccttacaccttatacaaaaatcaattcaaggtggattaaagatttaaacgttagacctaaaaccataaaaaccctagaagaaaacctaggcattaccattcaggacataggcgtgggcaaggacttcatgtccaaaacaccaaaagcaatggcaacaaaagccaaaattgacaaatgggatctaattaaactaaagagcttctgcacagcaaaagaaactaccatcagagtgaacaggcaacctacaaaatgggagaaaattttcacaacctactcatctgacaaagggctaatatccagaatctacaatgaactcaaacaaatttacaagaaaaaaacaaacaaccccatcaaaaagtgggcgaaggacatgaacagacaattctcaaaagaagacatttatgcatccaaaaaacacatgaaaaaatgctcgtcatcactggccatcagagaaatgcaaatcaaaaccactatgagatatcatctcacaccagttagaatggcaatcattaaaaagtcaggaaacaacaggtgctggagaggatgtggagaaataggaacacttttacactgttggtgggactgtaaactagttcaaccattgtggaagtcagtgtggcgattcctcagggatctagaactagaaataccatttgacccagccatcccattactgggtatatacctaaatgactataaatcatgctgctataaagacacatgcacacgtatgtttattgcggcattattcacaatagcaaagacttggaaccaacccaaatgtccaacaatgatagactggattaagaaaatatggcacatatacaccatggaatactatgcagccataaaaaatgatgagttcatgtcctttgtagggacatggatgaaattggaaaccatcattctcagtaaactatcgcaagaacaaaaaaccaaacaccgcatattctcactcataggtgggaattgaacaatgagatcacatggacacaggaaggggaatatcacactctggggactgtggtggggaggggggagggggagggaaagaaaaaataaataaataaataaataaataaataaataaataaaaactaggtattgatggaacatatctcaaaataataagagctatctatgacaaacccacatccaatattatactgaatgggcaaaaactggaaacattccctttgaaaactggcataagataaggatgccctctctcgccactcctactcaacatagtgttagaagttctggccagggcaatcaggcaagagaaagaaataaagggtattcaattaggaaaagaggaagttaaattgtccctgtttgcagatgacatgattgtatatttacaaaatcccatagtctcagcccaaaatctccttaagctgatgaggaacttcagcaacgtctcaggacacaaaatcagcgtgcaaaaatcacaagcattcctatataccaataacagacaaacagccaaataatgagtcaactcccattcacaattgcttcaaagagaataaaatacctaggaatccaactttcaaggggtgtaaaggactcttcaaggagaactacaaaccactgctcaatgaaataaaagaagacacaaacaaaaggaagaacattccatgcttatggataggaagaatcaatatcatgaaaatggccatactgcccaaggtaatttatagattcaatgccatccccctcaagctaccaatgactgtcttcacagaattggaaaaaactactttaaagttcatatggaaccaaaaaagagcccacattgccaagacaatcctaagcaaaaagaacaaagctggaggcatcacgctacctgagttcaaactatactacaaggctacagtaaccaaaacagcatggcactggtaccaaaacagaaatacagaccaatggaacagaacagaggcctcagaaataacaccacacatctaaaaccatctgatctttgacaaacctgacaaaaacaagaaatggggaaagtattccctatttaataaatggtaatgggaaaactggctagccatatgtagaaagctgaaactggatcccttccttacactttatacaaaaattaattcaagatggattaaaaacgtaaatgttagacctcaagccattaaaaaccctagaagaaaacttaggcaataccattcaggacataggcatgggcaaagacttcatgactaagatgccaaaagcaatggcaacaaaagccaaaacagacaaatgggatctaattaaagtaaagagcttctgcatggcaaaagaagctgtcatcagagtgaacaggcaacctacagaatgggagaaaatttttgcaatccacccatctgacaaagggctaatatccagaatctacaaagaatttaaacaaatttacaaggaaaaaacaaacaaccccatcgaaaagtgggcaaaggatatgaacagacacttctcaaaagaagacatttatgcagccaacagacacatgaaaaaatgctcatcaccactggtcatcagagaaatgcaaatgaaaaccacaatgagataccatctcatgccagttagaatggcgatcattaaaaagtcaggaaacaacagatgctggagaggatgtcgagaagtaggaaagtttttacactgttggtgggagtgtaaattagttcaaccactgtggaagacagtatggtgactcctcagggatctagaactagaaacaccatttgaccagccatcccattactgggtgtatacccaaaggattataaatcatgctgctataaagacacatgcacacatatgtttattgtggcactattcacaatagcgaagacttgaaaccaacccaaatgcccatcaatgatagactggattaagaaaatgtggcacatatacaccatggaatactatgcagccataaaaaaggatgagttcacgtccttttcagggacatggatgaagccggaaaccatcattctgagcaaactatcacaaggacagaaaaccaaacaccacatgttctcactcatagatgggacttgaacaatgagaatgcttggacacagggtggtgaatattacccactggggcctgtcgtgggtgggggactgggggagggatagcattatgagaaatagctaatgtaaatgatgagttaatgggtgtagcaaaccagcatggcacatgtatacctatgtaacaaacctgcatgttgtgcacatgtaccctagaacttaaagtataatttaaaaaaaaagaaagaaagaaaccatcttgaaaatctccaatttgttttcaatgttttctcagaaattacgttgcttttttttttttgaggtggagtcttgctctcgtagccccggctggagcacagtggcactatctcggctcactgcaacctctgcctcctgggttccagcaattctcctgcctctgcctcccgagtagctgagattacaggcatgcaccaccacacctggctaatttttgtactgttactagagacagggtttcaccatgttgaccaggctggtctcaaactcctgacctcagatgatccacccgacttggcctcccaaagtgctgggattacaggcgtgagccaccacacccagccaatgacattgatcttaaaccatttctttcttctgaccaaaaccagaatttgccagttacggcactaatgcgttttcaccatccatcattacactccttccaggtgatattcttgcctcaatcatgtgattctgatagggtttcccatcaccctctctcactcctatcactattttaatgccagtgaggccctggcccagccaattataaaatccctttccctagccacagtggtcttctatggacactctcagactctaagtcacccagggatcttttaattttgagattatgattcagtagatgtaggtatacctgagagtctgcatttttaacaagctcacagatgatgtctatgtggctgatctgtagagatcaagatgtaggtatctcccagggtgtagggttgcacattttttttttctgtgtttgtggggaggtctcctggattggcaagagatttttttttttaatttttttattccataggtttttgggtagcaggtggtatttggttacatgagtaagttctttagtggtgatttgtgagattttaatgcactcatcacccaagcagtatacactaaacccaatttgtagtcttttatccctcactcccttcccactctttcccccgagtccccgaagtccattgtgtcattcttataccttcacatcctcacagcttaactcccacttatgagtgagaatatgtgatgtttggttttccattcctgagttacttcacttagaataatagtctccaattccatccaggttgctgtgaatgccattaattcattccttcttgcggccgagtagtattccatggtatatatattccacagtttctttacccactcattgattggtgggcatttgggttagttccacatttttgcaattgcaaattgtgctgttataaatgtgtgtgtgcaagtatccttttcatagaatgacttcttttcctctgggtagatatagggttgcactttaaccataccagtccgggtagtcgacacagaggaagccaagggatgggaagagaaggcataattctgttgtgcctggtaccagtcctgccccactccagttacacggcccaataagtctgctttttgtttaaataagactgagttgaatttcctcatttacaaccaaaagaattcataggatatagattttcttttgatataagctaagtgtccaagctgttctgggcatagctattcctcatctgttacatttgcaaactaccttcaagaatgatggcttgtgactcatgattataagaaataactaggaacagatgtaattcctaaattacttcttacatgttggaaaattcatttttctattacattagttattatctaagtaaagctaatacattgtcttttagggttacttgctgatcaattgagtgaaaaaaattgtattaattagaaatttttattcccactcttctggcttcctgtaagtagatacctattgacttctctgtaagtgaatatacttctggaactaggaaaacccaactccagtctactgtggagtacagacatttgtgagctaaattcatatttgaaatgacatgcggataggtttatgatcctaaaattctaccaagtttatatgtttctacatactacacttatctgtaaaagtgtaaaccaattgtttttaactcacgttaaagataagttgagatcattttgcattttcaaacattagggtctctattaactgcattgtcagttaaaaaggtcctcctctattcattactaatcagccttggagaatagatggctggcaatttcaaagacaaggtgaagtgaacacttggagaaatcttcttagtgaaaaatgattcattgttttgagaggcaataatgtcacagtcctctgagacaaaaagagaatccttactacaagaacaaatagtaattagcaaatttgcaaagcatggtcgttatccttttgttacagcaatttatttttagtccaagcgacagtttattagagcgttcattttaggaagctaggataaattaagacagcaaagcaactttaccagttcagctctacagcccaaccttgatatgcttcttcctcctggaggccttacctgttcccttgggatcaagtaagaggctttgtgaaggttcccacagcatcctaatccccaacccccatcattattctctgaaccacaccacactggttcacttttctgaaagcctccttgcctctcttcaacccctcctcacagtgcagtgttttgcactgtttgtgttttaaatatttgtttatgagatggacaagaaagttggaagatgctgcattacagtcaatgtaattcactaaataagggccaccttatgtttttaagttgcttgcatggcgctgatgcaatctgctttgagaaaatgttatgcttcattgagctttttttaatgtaatatggaaaggttttgtttctcctatatgaaaaaaaaaactacccaatgctgctgaatttggcattaaaagtcattggtggcgttctttcattcaaaaaaacttcaaaaacaaagccatagcgaagggtttaatagtattgataaagtaaagaacaagtaccttttaaacactgtctcaaggtaaaggaaggcactttgtgttagtttttttctgctattaaattatatcaacagctaccactagagggcgcttggcctctttttatttttagtaaaccaactgctgctttgaaatggcacctactgccttcacatattactgtatccataagctggtatttccattcttcactgtatgtgcgagttactttattcttaaatgttatattactcctcacatatttcatctctataagccaatgatttcgttcatgtttattgaatactagaaaattataactttcctcgatggtggttaatttgaaatgtattcttctccccactgacatactaagaaaaaaaaagtttcaatgtcaaaacgtaataagtttctacattcaaaaaatagatgagaattattgtatattcctaaaaaattaagagaaaaaacatttagcaactatctttaacttaattactgatgaggtacccaaattttgtcagtgtatggcacagttagtgtctcagtaacttttttcgcatgctccaaaaaaaaaaaagttctgtttattacatagttaggtttatgcaacttaagaagtatttacattctaacaacttactcgctgtttgaaaaaattacacacataaacaaatgggaaaaaaaatttttttttttgagacagggtctcactgtgtcacccaggctggacctaggctccagtgacccaagctcactgcagcctcgacctactgggctcaagtgaccctcccacttcagcctcccaagtagctgggactacaggtgcacaccaccactccctgctaattttttttttttttaattgtagagacaatgtctcattatgttgcccaagttggtctcaaactcctgggctcaagccgtcctcccatcttggcctcctaaagtgatgggattacaggcatgagccactgttcctggcctatttcattatctcacactgactatattagttacccattgcttcataacaaattacccccaacatttagtggcttaaacaacaagtcgttattatctcatagtttctgtgggtcagggatgccagaggagcttatctggatggctgtcgctcaggatccctaatgaggttgccttcatgatggtggccggggatgcagtcaccagaaaggttacctgaggctggaggacccacttctaagatggttcattcccatggctattggccagtggcatcagctccctgctggctttttgcaaaagagctcatttcctctccacatggcacacccacagggctgcttgagcatcttcacatgctcaagccgtgaagcagctggcttccccaaaactgagtgatcaacaggaaaaagcaaagaggaagatgaaacgccttgtatgatctagacttctgagtctcacacttgcccttctgccacattctagttttcaaaagctagttactaagtccagcccatattcaaagggaaaggaattaggattcatccattaaagggaagattgttaaagaattttggatacattttaacaccatcacagttaccagtgaggtacatgcacctattgggcactagacacccaacctttagaaccaaattcaccaccaccacccttatttcccgttccatgttaattgtcatatagtatctattttttatcacagcaacttctgaaaacccagcttccaaagatatgtcttttagaaaagcattacagcacaatctaaggtttaaattataaggtattttgagccagtagttcatgcagcagccaacaaatgtttctgtgtttttcttgagaattttcaatatgtcgtgtggcccctgtgaggtcactgcaacttcttggggtgcctcagtgcacaatttgggaatcataagcttaattatctttttctcagagataaaaatgtagagtatgtttaaagaagtctttctaaatacatcaataatttctctattattcatactctggggatattataaaggaggctatttctattcatagtatggaaacaaaatgaaaattttattactttataagtatttatttaatataaaaatattctaagggctggacctctttcctttgcccattttaattgaacaatggatggactatgaagaaaaagtaatccaagaataaaaaaatacaaatcaaaggttcagtttgaaaaaaaattatcatccaagaaataatcatttcctttttatattaaaaaatgttctctttattctcatttcccaatataataatattttagtgttagcctggagtctgtgccaaatgattacacagtatgtctacttcctgacccatagggagttaatcttcgataaaaaacaagctcaggtaatgaaagatcttcctgttaattgcaagtgataggaaacacacacacacatttctcttactccttcctgaaaccccactaaaataacaaaaatgatgtgaaagggcataattccacaaaaatgaggagaacagaaaaggtgattatagaagatgattactgtacaccaaaaaaagatgattattgtacacaaaatgaaaagcttataacctttggtaaatggctttggactcatatatctctgctctgctgagtacctgaaaaagaaaaaaacaactagaagaaagttgattcatgaactcagaaaacttctatcaatagaggaaccaggggcctctgaaggtgttaagtttgcaagtagggctgaaaacagaagaatttgttaaaagtctgaaaaaggaggtaacagactcttcagtctcctcccaccgtccatgcaggcaggtgactacatgtcacaaaagatggtaggtttcttattaataacatagacgttcattggataacatagatgttcaatcagtctattttcagaagagtgagatttctagttcccttctggtagtaggccctcagaacaatgactgttagacttatactccatcataggagataatgaaaatgtcctttagggaaactgtctagccctatgaataccgacagccaagaatcccccaagacagccagctcctgcctgagctctctacagtaaaacctgacacacttgataagcttcacaggaacatgggacttcttttttttttttttttttttttttttttgatggagtctcactctgtctcccaggctggtgtgcagtggcgcaatctcagctcactgcaagctccgcctcccgggttcacgccattctcctgcctcagcctccccagtagctgagactacaggtgcccgccaccaagcccagctaattttttgtatttttagtagagacagggtttcaccatgttagccaggatggtctcgatctcctgacctcgtgatccgcccacctcggcctcccaaagtgctgggattacaggagtgagccaccgcgccctgcctgaatatggaacttctaatcaggatttactgccactctttataaaaaataatttattttaaaataacttacataaaaactttcagatcagaacaaagaattcttgtatccctttcattcagattgtccaaacattaacatttttctgaatatgcatggacaccaaccccgtctctctgtgtatatgtagggagaggaagtgatccattatcattagtcatactctgaactttttaagagaaagcttcagacacgatgtcccattatccctaaataatccagtgtgtatttccccaaaacaagaaaactctcccattcaaattttgccaactgtccaaaactctctctttttcctttctggttcaggattgttccaaggaatatatgttgcatgtagttcttatgtctcatcatattcattcagcttaaaacaataattctgcctttgatgtccttaaccatttttaaagagtaaaagcggcctggtgcagtggctcatgcctgtaatcccagaactttgggaggctaaggcgggcggatcacgagctcaagtgatcgagaccatcctggccaacacggtgaaaccccatctctactaaaaatacaaaaaaactagctgggtgtggtggggcgtgcctgtagtcccagctactcaggaggctgaggcatgagaatcccttgagccgatgaggcagaggttgcagtgagccgagatcgtgccactgcactccaacctggtgacagagcgagactccatctcaaaaaaataaaattgaattaaaataaagagtaaaagcttcatattccatgtaatgaccatcacagtgtttctcgggagcagacacaggacaggtatccttcacaggaatattacggaaactatgctatgcttttcccactgtatctcatcaggatgtacaaacttagcaaagaaaacacacacacacacacacacacacacacacacacacacacacacaaaatattaagcctgagaagtataagtacaaggaaagtacaagaaaggaaatgaagccagagtttactacgataaagaactgggaatggtctgagacttcatcttatttgcaagccaacaagttagcctgccatagtttcatggatgctggggaaagacctgagactcccaggtcagaggcaaaggattttattactcacaaaacagtaagcaatatgagctttatggtcactctggttccccttgccctccagttcccatggtggtgacaaagagtatccaaggcagatgctgcatatgcagtgggtttgtatcacagctaaaaaaccctgagcttggggaacctcagtcttttataatgggttgaaagcaaacctacatgacttttggccccgtggaagacattatctttaccatactggatagcaaacacacctgtcatctgctctggagggagatgctgtctctatagtccaaggctattcactatatttatatcctggaaatcgcagtctggaacaaaacctgtcactacctgtgcccttaaaatgtgcagaaatataaatgacccatgaagaattgttgtccaaccactgcgtgactcatctctgaaaataattacacataaaacaataaggtaaactctagatgttgacttacccaaaaaattgtgactaaatatattggcaaaggggagaaatgggaggagtatgttggggaaggtagacaggcataaaacataataaattttatattctatactaggaaataaatagatgacatctaaaacagaaaatcaaaaaatagaagtaaaagtgtattacttttaaaatgtaggaaaataaataaaagtgttaagtgtggtattgcctcttaggtatagttttgttttcatgaaatgggaaaggtggaacaagcaagccctttttttcagcataagctatttgacctttttaactatacacaagattatcttcataaaaattaaaatacaaagccaggcatggtggtgcacacctgtagtcccagctacttggcaggctgaggcaggaggatcacttgatcccaggagttcaagaccaacctagacaacatagaaggccccttctctaaagtaaaataaaataagcctgggcatggtggctcacacctgtaatcccagcactttgggaggccaaggcagaaggattgcttgagcccaggagttcaagaccagcctgggcaacacagtgagaccctgtctctacaaaaaaaaatttttaaaggccaggcatggtgactcacgcctgtaatcccaccactttgggaggtcaaggccggcagatcacttcaggtcaagagttcgagaccagcctggccaacatggtgaaaccccgtctctactaaaaatacaaaaattagccaggtgtggtcgtgcacacctataatcccagctactcagaagactggggcaggagaatcacttgaaccaggaggcagaggttgcagtgagctgagatcactccacttgcactccagcctgggtgacagagcaagatcctgtctcaagatccttttaaggctccatctcaaaaaaaaaaaaaaaaaaaaaattagccaggcatggtagcacccttctgtaatcccagctactcagggggctgaaatgggaggaacgcttgatcccaggaggtagagactgcagtgagccatgatcgcaccactgcactccaacctggatgacagggcaagatgctgtctcgaaaaaataaaataaaagataaaataaaaaatgtaatttaatttagagagagagggaaatagaaagagctcctggagcacaatagttttattataatcattagattatggcttgaggaaatctgccccaaacatctctaaagaactaataaggatataggcacctcagtgtttgaaaaggtagcttttaaaggcataaagccagttgccttatcttaaggaacagacattcactgtcagactataggacaacaccctcagccctggtaggtatgattggatttccactctagcattcactgggcacaatagctacgcgctcttctcaaaggatgttggaagacacaaaatgacctcattgctggtatggtgtccgcaataatatctcccagctgctctaggctgtattcacaacaaaggaagcttgactttgtgcagccctccaggctgttaactctcaggagcccattcatctacacagacatatggataggaacaacgtgggggtggaggtggaaaaaaacagtgaaaaagaaaaaaatgctaacatatttcaatttcataaagagtcaagtgttatgtcacttaacgttttcttccaatcttttttgatactaaaaaataaaagcaaaaaattatggaagtgtataaagtagaaatcaaaagcaccccatcctacttaatcattccctaattccactccgcagaagtaacggttttcaaccgttcaaaatctttccttccagatatttttagaatgcaaatatttgcgcttatatacatgtgagcatactgacttgttttacctagattatatcatactatacatgcaaatttgccttgtgtttactttgcttaaatgattgcaagattgttctaccagtacataaaatctgccttcctcattctttctaagagctgcagtttctattaatgattacttcttttttttttttttttttttttttttttagagagagcatcttgctctgtcgcccaagttggagtgcagtggcatgatctctgctcactgcaacctccacctcctgggttccagttcaagcaattctcctgcttcagcctctcaagtagctggcattagaggtccgtgccaccatgcctggctaatttttgtatttttagtagagacagggtttcaccatgttggccagactggtctcgaactcctgacctcaggtgatctgcttgcctcggcctcccaagggagtgaggcgtgagccactgagcccagccttatttccagttttatcctgttataagcaatacccattcttttcctatttctgtgctgttatttgagtatttgtgaaggataaactcttccaagtcgaatctgtgtcagtgggtatacagagttttcacatggctgcaccatacagtctttgcaaccatactgtaaagctaatagtcttgctttcattttaatattaaggaaagtgagaaccacaacatccggtattttcacccaaagtctggcagaaattaagtgcaaagattaaaactacattcctttcaaatccaagttcaagagtggcttagacagacaacgtcaagagcagcagtgggcagaatggaggcttctggagcaggcatgtagacacccctaaatgcttaggatgagtaaaccagaactccttactgaccagactgtgtagctccagccttttaccattcccaagatgaggacggtccaggacagctttacagagataacaaagaagtaggattggcaacccaacaagtcaaagtagccgtaaccgtagccactcccatgaccaagcagaagcagcttccagaaggaagcagatagatttgttgttgtgacagtctgggacagccacactttgggtggaacaaatgagggccactgagtcacagaggaacttggaggctaaggcagagtgaactgtgaattcgaaagactttccctgtgttatcaaacactaatgagaaactgatcacatagtggttagtgttacataaaattaacctataaacctccacattcatgggtgcaaagctttagttacatctcaaagaagagttttgattttaaaatgtatgtattcaatgttcttctttcataagccaaaaatattctttattttcataatagtaatgtgtcgtttgttgactacctataacttccagacactgttagaggctttctttctttctttctttctttctttttttttggagacagagtcttggctctgttacccaggctggaatgcagtgagtagctgggaatacaggtacataccaccatgcccggctaatttttttttatttttagaagagacgtggttttgccatgttggccaggctggttttgatctcctgacctcaagtgatccgcacgccttggcctcccaaagtgctggtattataggcgtgagccaccacgcccagtcctagaggctttcaaaaatataggccaggctcatgcctgtaatccccacactttgggaggacgaggtgggtggattacttaaggccaggagttcaagaccagcctggccaacatggcaaaaccctgtctctactataccaaaaaattagctgagcgtggtggtgtgtgcctgtagtctcagctacttggaaggctgaggcatgagaaccacttgaacccaggagacagaggttgcagtgagccaagatcatgccactgcacttcagcctgggtgacagaatgactctatctgaaaaataaaaataaaaaaaaaattacaatatgccttcctttaatccttgtgaatttgaagttgttttcttttaatataaagcaaaattgatctataactatacagccaagaattagcaaatatctgcagaaaacctctaataaaatgcaaagaccacaataaacaaacagaaaggaaaacttaggaaaaatagaaactatgccaggagaagaaaacaaaaaaaaaattatatataaaatgaaaataagaatctatacttttaaaaagaacattcagaaaataagtaaaatgaaaacataaattaaaaagtcatttatgtggatgtggagagagggggagtatgttagtatttaggaaatttaccacagatttgagctaaaataagagagaaattatggaaatttaaaaaccatacaaagagaccaaaggttttagcaaatagagagtaagtcactgaagaaataagtttgttaattacccagaactctcagataagtttccaggttgaaaaagttaattacacatacaacataatagacaaaaatagaaccatgtacgtcgtgaaatttcaggaaaatggcacaaaaaaagatcctaagagtttccagaaagaaaaaagaaaaaaaaaaaggttaaatacaaagaatgccttcagacttctcaccaagaagactagaaagtaaaaggcaatagaacaatgccttagaaattctgaagggacatttttccccaaactcaaatactgtatccagataaaccctccattgactgtgatgatagagagtcaagaaaatagctttcagacatgcaaggactgaaaaaagttgcctcccgtgcattcttcgtcaggatgctactaaaagattaggcccattaataggagggaataaatcaagaaacaggaaagtataaaatacagggaaaaggagattcaacatgagaaaggggtggcaggactctactagatgatgtaaatagtacagaatgacagctgtacactggcatagaggactagttccaactgcagttagtcaaaagcctctggaagaaatttctcccagcacaatgtaattgctagaatatccccagataactggcaaaggctttgtgttaaatagcatgttttccaaactgggatgtactgacagcaagagaaagcattgctatttattacaccagacaaacaggcatagactgggatgaagggtcagagtggtatgaacaaaagaatcttcaagaaaggaaaatggtcatagtggcatgaacaaaaggaacattatgattacaaacctgtgaatatctctcataatatgtgaacactgatttttaatccaaacaaaattacagcataatcatagtgaaaaaataagtaaatatatggaaggagtggataggtgtggtgaagatgggggaagaaagaaaacaaaatcctcatcttctacagtgagaaactgatagacaacgcataaaactgaaaaataaagtagtcctataagcatgttatttacaggcaaaaaagtaaatacaagctaggcatagtagtgtgcacctgtagtttcagctacttgggaaggctgaggtgggaggatcacttgggcccaggagtttgaagccagcctaagcaacaaagtggaaactcatctttaaaaaaaaagaagaaaggagggaaagaaggagaaagagagagagggggaggaatgaaggaaggaagggaaggagaaaggaagggatgaaggaaagaaagagaaaaagaggaagggagggaggaaggaaggaaggagggagaagggaagggagggagggaaggaaagagagagagagggaaagaaagagagaaagaaggaaagaaagaaagaaaaagagaaagaaagaaagaaaggaagaaagagaaagaaggaaggaaggaagagagaaagagaaagaaagaaagagaaagggagggagggagggaggaaggaagataggaagatgggggaatgtagttttccctagggagaagaagatgggcagacaggaacagggaactgctgtttttcataattatttgactctttcagctttatacatttatatctttgataagaacaaaaagtaaaaacaaaaataaagatgggagagagaggaaagaagggagggagggagagagcaacatatgtagttttcatctagtataacttaaaaatgtcaatagaaatatcaaatccaagctacatttgacaggattttccaaagtgtagtttattttgctttggtgagttgcagggaaagggcaggcagagtctatgtaaaagaaaccaccctcctttgcgtttacaagagtaaggaaacgagggcaaactgagctgatgctggagcatgcctggtagttatgtattcagaaatgagccactccgcagtgtgtgtttgcaaagccgtgaatcgtgggcctttaattttcttcgtgggattttcaataaccaacagatgttactgagcaatctataaaatgaaattgtgaaaataaagggaaaaaaaaccacccacaccttttctttctttgctatgttcttatggttgctgctacttcacccaaacagatattgccttttctgaaggcaccaaatacctgtttgtaatttgattttcagaaatcttagccaacatgttctgattaggcctaaagaaaatacggtgttgctaatacctcttcatcactgacttacctccttcaggggtttgggaaaaggctattttttttttctaaatttcatcagtgatatacttgtgcaaagccctgtgtgaagactgttatcagaggctgcctcctggtagatatggaccccctgccctcaaactctctactataggtacatattttcttatcttctctgagcatcacttacttttaaagccattaaaaaaaaattgagagttacaaaaaaattcagtcagcacaaattcctaatgaaggtgttcaaagcaccttttttttctttttttaacagagtctcactctattgcccaggctggagtacagtgatgcaatcgtggctcactgcagctaattgtttaattttttctaaaggcagggtcttgctgtgttgcccaggctggtctcaaactccttatctcaagcaatcctcccacctcggcctctcaaaatgctgcaaatacaggcatgaaccactgcatcggcctataacttttttttttgagacagagtcttgctctgttgcccaggctggagtgcagtggtgcaatctcagctcactgcaacctccacctccgggattcaagtgattctcttgcctcagcctcccaagttactgggattacagatgtgcaccaccacacccagctaatttttagtagagatggagttttgccatgttggccaggctggtctccaactccagacctcaggtgatccacccacctcggcctcccaaagtgctgggattacaggcatgagccaccatgcctagctgcgcgttttttttttaatagactccactataaaacatttactaattcaactcacatccttgaacttaaaaacagagaaacaatctaacttactgtcaacaattgctacaggccatgggatgccccctgcttttatggcaccatggacccagcatttaggggaggcagtagagacacatctaggactgaattcctactccacaagtgtctagctgtgtaattttttaggtattaatcatgccatacctcagtttctctatctgtaaagtaaaaactgtaaggcccagccaggcaccgtgactcatgcctgtaatcacaatactttgagaggctgaggcaggtggatcacctgaggtcaggagttcgagaccagccttatcaacatagcaaaacaccatctctaacaaaaactagccgggtgtggttgcgtaaacctgtaatcccagatactcaggaggctgaggcaggagaattgcttgaacccgtcaggtggaggttgggttgcagtgagctgagagatcacaccacttcaacttcactccagcctgggcaaaaaagcgaaactccgtcaaacaaaagaaaagaaagaaagaaaggaaagaaaggcaagaaagaaagaaagaaagaaagaaaagaaagaaagaaagaaagaaagaaagaaagaaagaaagaaagaaagaaagaaataaagaaagaaagaaagaagaaagaaagaaagaaaagataaaacagtaaggccttcacatatgctttaccacagtaagtggcttacttcagtaaggcaatcaacaaacacagaactctctttcctcttatttcttgaggcatggggaaagagtatgcaggcatgcctactttccctttcacatgacccaggttctgcactgtctcctcttatttgggatatgagaagaaagggaagatgttagccaatgaaagacatccttgtgagcttgcattcaattcacattaaaggatctggaaaatcagatcaaccccctgggttctgccctttcactcaagagtctggactttgttaaatcaccggcagatatatattttttttcggtgacactgtcaaatcaaaggccagtgagagctagcaggatttctctctttgaaaagggtttctaaacagaaattacaggacaatagtaattcacttgtgtccctttaggaaacgcagtaaagaaaaaccataagccatacaacagacaaataaattagcagattataaccaggaattcctcatcttttcttcttgggtattgtctatattatgatcttgcatttgtatagaatagaatacacaaaaatcttagggcctagaatattagaggcacttaaaaccagtaaccccaatttacagatatagaaactgttcacagagatcaatagccttttccaacttactacagcttattagcagtgggtcttatttctatccatgcactttactctttagcttgcaattcaccagctttagcttgcaatttcagacacaatgcaattcatacacaatgcaattcacaatttagcttgcaattcactagctttagcttgcaatttcatacacaatgcaattgtgtatgaaaactgtatttttgcgtgccacagatttatataactatattattctgtgatttaggaatgagctaataggctttacttttattttaaggaactctcaataaaagttctgctttttatttaagtaaaaaatgttaaagggccgagcacagtggctcacacctgtaatcccagcactttgggaggctgaggcaggtggatcacttgagatcaggagttcaagaccagcctgaccaacatggtgaaatcctgtttctaccaagaaatacaaaaattagccaggtgtggtggtgcgcacctgtagtcccagctactcaggaggctgaggtgggagaatcgctgtaactcaggaggcggaggttacagtaagcggagatcacaccactgcactccagcctgggtgacagagtaagatcctgtctcaaaaaaaaaaaaaagttaaagggtgagtgtaaaaggaaaggctgggtgtttggggaatcaaatagaaaataaggaaattgtctaacacttcattggcaagtctagaaataaaaacgagactgttttttctgtttctttcctcctttgtattgtccttaggttcctctctgaaggcagaaatgtcaaagatgctttgctaaaacccaaaaagttgctatgcaacctacatttaaaattatttcttcctacctagaatcccagggatctataattttgccatctaagagagaaacatgccacgtcagaaggaaggagaatatgacagcagattttggaatcaattgtcaatgtagtttgctagcttatcatggtttcttagacactgtgtgagcaaatctcacaaatggaactgatttaccataaaaatgtgcctaatttccattaaatcttgttcgttgctttactgaggcactgaagttaccaatgttccactggttgacctgcggggctatctctaggttatgttactccagaaaatgaattgtgtataaaagaggccttggaggaaggcgttttattcgcatcagttgttttgcacattgcttaagctagagatgttagcagcttcttaaagagagcagcgttagccagacctttggggcaatagtgggaaatggaagtttctctgtcctatgcttgatagaaccatgtcggttgagacacgtttctatcatgcatagggcagggtataagaaatctgttttcagagacttcatgggataaatgaaggcttaagagcccttcatatctcagttaaaatcccagagctgctatttgcccttgatgaagttaaccttcaaaagtcatttccttcttctagaataggcatgaaccaactcaaggggttatgatgagaattaaattttaaaatcatatgtaaggtgctcatcccagatgtggtcatcagtatgtacataacaaatgccagcaatctttttgattacagtgatgatgattattctaattgaggcactgcaatttaccagcagtgtgtccttgaaagcacattttcttcaattggaaaatgaggataataatatttaccttgcagagttgttctgaggactagaaatgctgtatggaaagtagccacagtatctagcctcacacaggtagactcttgataacttgttgttcttgctattttcactgccacctattatttatataacaatctgtttaaacttgagagaagccatgtttcatataaaggctggcttttcttgatatagtaagttttatacactgttctatttgataaatgttcactcaagagatagattaaatttccctttgtctcataagtctctgttcaagttaccctaagcataattcccaaaagaaagttgtggttaaaatcaaaccggtgtccactactaacagcagagcttatcagcaccaccgtgaaaaagacacacaaaaaattccccagctaattgagatatgcgctgtcagcagtttggacaaggcaggaaaccaaccagggttagagggcctagagagcattttattctctttggcctcaaccttctaaatatcttattgccacatatagtttattagtcatagaagaatgggctttattcgagtaacattttgcagaagctgttagccatctggtctgcccacattaggcaccagattcttgattcaattatcagttggagccacatggttccagcacatctcttaagcaatgccaaaatacatccttttcaattgagaaaagagaggaagttagtggagaacacagagcctgcaatatgggagaaaaacatttagttgctttggaagtcctaagttccgccttattttggctctgcactaccagtacacccttccctaccaattcaacctcctaggcatctatggcttaataattccttcaccagaattaacaatgtccttctgcaggtctctccaggctctagaattctaaaagacattctcttcaacttggtcaattttttctcaaccaggcatatgtttctaaagatttttgaattgattggtaaagttaaaccctccttcagggaacttaggcctctttaccaactgttctctgatatatcagtttcgtttccctgtattagcctgggtttcctgagacaaggtaagaggaatttaggggcagtaatcctaaggaacaagagtaagggacttagtagaaaggaattgaggagagaaagtcaaaccaaacgtatgttacaaaactggtcatcactatgggcaacagagccttgatcctcccacctcctggagactctctgagaagccgtgttgatgtgatgcagggttgtcaacctggggggatgaaaaagcagaggactcatccagtcgcccatcttctactggtcaagcattgccacatggagcgttcgcacttcctcccttttaggtttgtccatgcatcagaatggcagaacacgttcccccaggcatctttacagggctgtgacaaagaagcccatggcagaaagcacaacactcacagtgcaactaagacaaggggaagtctagtttcacctgccatgcctggtagccacagcaatgactggattaaaaatgattagaacttccagaaagctaaatacatggaggccaacaggaaaatgaagaagaattcatccaagtgccgggagggtggcacaccccttccagacctcacccttgtatgttttcatctggatgtttatcctttaaaatgtccttctcagggccaggtgcggtggctcatgcctataatcccaacacttaggaaggccaaggcacccagatagcttgagcccaggggctcgagaccagcctgggcaacatagcaagaccttgtttctagaaacaattaaaaaaaaaattagcgccaggtgcggtggctcaagcctgtaatcccagcactttgggaggccaagacgcgtggatcacctgaggtcgggagtttgagaccagccggaccaacatggagaaaccacgtttcaactaaaaatacaaaattagccaggcgtggtggcgcatggctgtaatcccagctactcaggaggctgaggcaggataatcacttgaacccgggaggcggaggttacggtgagccaagattgcgccattgcactccagcctgggcagcaagagcgaaactccatctcaaaaaaaaaaaaaatttttttttaaattagctgggcatggtgatacgggcagtccaggctactcaggagactaaggtggaaggatcacttgagcctgggaggtcaagactgcagtgggccatgattgtgccactgcactccatcctgagcaacataagaccttgtatcaaaaaaattttaaaaggttggctctaaggtgatagaaagcagatcagagaggtgaccctgatgttcatgtgacctcaatgggaagattcacattaataaggctctcttcaatattttatcaaccttcatgaatggtaaagaaaactttatcacttccatttcataatctgaatcttgtttggggtgagagatatagtttttttgacagtaaatgtatatttttaaaactttccatggagcctgttacttcacaaattatttttaaattatacattttaaaagtggatttttaaaatatttattgaacatttattatcctagatatttttgaagaggcagaatacaaaaagaacaaaatgagatccttttctccaacaagcttataaactactcaagggagacagggtaagacagataattaaagagattgaatgaagctaatagagggagtagaaccaataatgaatgtactctaaatttgtagcagttactcagcagacagtcatcaatgcttcagaatcctagccagatgtacagaaacattatagattgacctgacatacatagaaacaaacatggatacaaaaacaaacaagaaaaaacactattttcagaagccaaaattttaaactgccctgtagggctgaggttttaatacccattagagaatagaggatgtagcttcaggggctaaaagtggaggagcttaaattgagtcaccaggtaatactgacaatcacaaaaaagcttcccaacttacgaaaaatgcatttagaaaaattatccaactaaccaaaataacagaaaacaatcttgctatctatatacaaatttaaaccactcacgtagtgcaaaatttacaagccaaaaaaattaatgcttcattcagactattgaaattgctagggtcaaggagaagaaaactaaaaactgatcttttacaatcataaccaggaaatgcagaggctctcaacaaaattcttcagtgcaaatgggtcaccgtaaaaaattacaacctttacaaagaaatgaaccaccataatggagaattagcagatacagcaaagagaaaaaaaataagtggtagaataatctgaaagagactctaaaataagtttgtgtgcatcagttagcttctgctgcataacaaagttccccaggatttaatggcttaaaacaacaactacctcatttttgccgtcagcaattagagtggttcttctaggctgggctgggttgggctgggataattactcaggtgggctcactcctatgtcctcggtcatcttatggattggccaggcctgactgctttaagttggtgttgtctgggatgaatgggactcctggagcccctttccatgtggtctctacagcaagctagtgagggtttgttcccatggtaatctgagggttccaagaaagtagacagaattgtggaaacttattgagccttaggctcagaattcgtaccatgccttatctcccacaatcagttggcctaaatgagtcacagggtctattagtcaattctcacactgctaataaagacatacctaagactgagtaatttataaaggaaagaggcttaatgaactcacagctccacatggctgaagaagcctcacaatcataatggaggtgaaggaagagcaaagggacgtctgacatggaagcaggaaagagagcgcttgtgcaggggaactcccacttgtaaaaccatcagatctcacgagacttattcactaccacaagaacagtatggggataaccgcccccatgattctattatctccacctggcccactattgacacctggggatttttacaaggtgagatttgggtgaggacacagccaaatcttatcacagggccaatccagattgaagaattacagggatagactggacttcttagtggaagggaaagaatctgtgatcatttttctgcaacttgccataatgatgtaataacttaaaaagataaaagaagaaataggaactaatcaaggaagaggcctgatatggtttggttgtgtcctcacccaaatctcagcttgaattgtagctcccataattcccacatgttgtaggagggacctggtgggagataattgaatcattggggaggtttcccccatactgttttcatggtagtgaataaatcttacaagggctgatagctttataaggggaaacccctttcacttggttcttattctctcttgcctgccaccacataagatgtgccttttgccttccatcatgattgtgaggcctccccatccatgtggaactgagtccattgaaactctttttctttataaattacccagtcctggatatgtctttatcagcagcatgaaaacagactaatacaaagccagtatgcagaaacaataggaaaatttgggaaaaaaaaaaagccgggtgcagtggctcatgcctgtaatcccagcactttgggaggccaagccaggcagatcacctgaggtcaggagttcgagaccagcctgaccaacatggagaaaccctatctctactaaaaatacaaaatcagccaggcatggtggtacatacctgtaatcccagctactcaggaggctgaccaggagaattgcttgaacctgggaggtggaggttgcagtgagcggagatcgcgcatttgcactccagcctgggcaacaaggtgaaactccatctcaaaaaaaaaaaaaaaaaaaaaaagaatcttcctcaagtgtcaaagtagaaaagaagggatctaaatacttcatcaatcattaaagctcttccctatactcaaggatctctcaaccccaatttccagaattagcctccttctactcctccatgtgtcagccaaagcatctcactctccacagatggttttgcttctaaatttccttctgtccagaatatatcttttctaccaaactgctcaatatttcaatatctcctttcaaacttctatttattccacctaccttttcttccatggaaattaaaaatagaagtaatagtatttatgattatttatgattatagtacttaagattctttatcatgtttcagctactgttctaagtactttgcatgaattctgttacctattcctacaacaccttctcaaggtaaataccattaaagatccatttacagaaggagaaaaaaaatccgtatcttcctgactcatacttttcacaatctgcatgttaacttccactctaaagtatcatttctcagttctcctaaagatatgatttctctaacttttggctttttatttttctttaaacagactgacaatagcaggtattggtgagggtgcagagcaacttacacagtgcaggtgggagtgtaaattgatataatcactttggaaaccaacccactattctctctaaaatgaaggtacacatatcctatgatcagaaattcaagcactatgctaggagataccaaacaaatgcatgcatatgcactaagaaacagatccaagaatgtccacagcatttttttaataatcccaatcttgaaataattcaagtatccattaatagaaaatggataactaagttcatgtattataagatggagtactatattgcaataaaatttagcaaactacaaatatatgatgagcatgggtgaatattaagcacataatgagtgaaagatgcaagacacaaaatatagtgcatgactccatttatatagagtgaaaaaaagaaggcaaaatgaaagttcattgtttggggatgcatgcttaggagagaaaactgtaaaccaatgcaaaaaggctgttgccttaaaagttagtaaagctctttctccatatggtagagaagaagtaatgtctaggaggaaacatttggggaccttctaggttctggcaatgtcctatttcatgacctttctggtggttccatgagcatttccttaacgatcattcattaggctgtacgatcttgttttgtgcacatttctatatatttgcaagttatgtttcacaataaaaatgtttaaagaagaaataacaaagatatgtagttacttcatatgatatggaagctaaagggtaggtagttgagcattcaacatgatcacactactgcctcttggaacactaacagtatgtcttgcattagttcagatcctccaaaagcagacgtgaagatcggattaaatatgcaagaaatttatttgaaacacctcttagagaaggaatgaggggagctagaagaggcaaggccggccttcagacaatgatacaagttctgacagtttgaaggtgagaggagagaaagggttggataagtagagtctcagaatgcagggacattttaagaagcttcagccaggcaaatgagacatattcaagccaaagtcaccctgtggaagatacctgctctttgcagggtttgacctgctttaatgtccctgccattctcaggtattggctgagagcagcttgtgggaaatgtagcctttgaggaaatgcaatggtagattcagagcccagcagctatgcaccagttacatcttccccacagcaggagatctgagcagcacatttccataactgctaaatccactaaaagtgatgtaaattgtgaaaaatcaaatatagcagtgcaaataaataagaaacacaaaacaatgtgaattgcataattactaacttatagtgtaaatatgaataatggattcgctaataaagttttatgatcatttcagtcagtaaatcattgaatatatataaaatattacattactattactctcattattactataacatactgttagtctgcattgaagactagggaaactagatttcatatccactgagttctatctgagattggcaggtaacatactgaatgattgtattagtccgttctcatgctgctataaagaactgcccagcgactgggtaatttacaaagaaaagaagtttaattgatcacggttccgcatggctggggaagcctcaggaaacttgcaatcacggtggaaggggaagcaaacacatccttcttcacatgatggcaggaagaaggagagccgagtgaagctgagcttctgccccttataaaaccatcagatctcatgagaactcactctctctcatgagaatagcatgggggtaaccgaccccatgattcacttacctcccaccaggcccctcccatgatacgtggggattatgggaactacaattcaagataagatttgggtggggacacagcaaaactatatcagtgatttcgattcctaaagccccgagaagccagttgaacacttctattcaaagcatttggctttgtctttcaaccttgataaccaagatgataaagaatatcccagcaggtggggatgtgtcaatctttattggtgtcctggtctagaatttgaacagcctagagcaggagtccccaacccgcagtaccggtctgcggcctattaggacctgggccacacagcagaaggtgagccaccggcctagcaagcattactgcctgagctctacctcctaacagatcagtctcccatcacccccagacgggatcgtctagttgcaggaaaacaagctcaaggctcccactgattctacattatggtgaattgtataattatttcattatatattacaatgtaataataaaggaaataaagtgcacaataaatgtaatgcacttgaatcatcctgaaatcaccctctgccccccttctggtggaaaaattgtcttccacaaaacccatcctggtcccaaaaatgttgctgaccactggtctagagaaatttgacttttaattaaaggcatttaacttgaagttgccacattgtaacagaaagtaaacaagctaccaacccaatcccatgtgatttaatggtaatgatagagtgttaagaaaataactatctctaacagtaagggatcccaacccctttgcccgaagcagaaggagaaaagagcaggcattcatgctcgacactcaggtttctctggaatattttgttctctcattgtgtttgtcataccatgattgtgctatttagaattcactttcattagtagactaggaagagtctacaaataatgaaagtcaataatgggggaaattgagaaaactggtgtgtgtttcttggtggctgtcatttcactgaaacttatttatccttgggttataccatggtttaacaggggaaatgtttgtatttcaaccttgaacttgtcattgttcacctgtttcaataggtgaaatgcctgctaaaataaaaagtaaaaacttccttggaaattaggtcagaggtcctttattacattttgaagtaaatatgctgcttatttcttattcttttttttttttttttttgagacagagtgttgttcaccctggctagagtgcagtggcataatctcagctccctgcagcctccacctcctgggtccaagtgattctgctgcctcagcctcccaagcaggtgggactacaggtggcaccaccatgcccagctaatatttgtatttttagtagagacagggttttgccatgttggccaggctagtctcgaactcctggcttcaagggatctgcccacctcagcttcccaaagtgctgggttacaggcttgagtcgccatgcctggcctgcttatttactctaatagttctacatttccttgatattgttctcagaagcaatggaggctatcattttaaaatgcagttacctgtgttggaaagaaaattgtagcatttccttttttgaggaaatgaagtgaaaaagtgagccactgggttagtctccaagtgaagaaagtcaggaattcttgtcccagtgggagaggatgagtttgttttcaggcattacattaaatgagaatatttgtctcatcactgtaagtgtgggaagaagtatgcgtgtggatattggaaagccagaagagcccttgccagggcagtcttgatggatgaacatcctacctgctagggaacatgaaggaagccaatccctcccagccatcgtctttgctcctaccctggcagtcacaacacaagcaagagattcaggtaggccaactggatgttcttgctcaagtgtttgagttataaataagtaacacaaagaaaacaaaatagtcagaatccattcacagccacagtaatggtgatagtgtcgtggcaaaatcaccattgactagccaggcatccttttgctctgtagctgccctggttcttgccctttcgtcaaaattttcctgcagtctttcattgattcctggagatctccatatccttctaacaagatttcttcttgcttaagattactacaaaagcagttttgcaacaaaaggcaacctaactgaacattagctaagcaggcaaaggggagctaaaattgtaatcccagtgtgggatcaggtcactaaacaggagctggaggcagaagctcagtcacagagagttaaaagtaaacaccaatgggaagacaaattgcttggggctccccccaggcatctgaatgctaactcttcaccagtttagctaattcccttgccgtcagctactgaagctcagggtccccctgcaccctctgctctggtcagtataactcaggaagtggctactagtgattctgccaagagtaagccagcatgtgctggtctccataggaatggaaccagagaaaacagggaccgagaagctgtgaaaatcattagtaaaactctagagctagcaaaagttcataaggtcaagagtttccatggaaggaggggtctccactaagtgggaagatacttcttcctttaagacagaaggaaaaggtggaaagctggggaaggaggcagcaggattggggataagaatatgtgaggtaagttatattggtagcttctattttctatgggaagcaagaagccagtctgtctgctaagaatgagggactgagagaaagaatagaggtttgaagatcagataaatgctgtcaatggtcactactggggaaagtatgaataaagcaaaaaaaaaaacaatggtctggtgcagtggctcacgcttgtaatctcagcactttgggagaccaaggcaggtggatcacttgaggtcaggagttcaagaccagcctggccaacatggtgaaaccccatcactactaaaaatacaaaaattagtcaggcgttgtggtgggcacgtataatcccagctacctgggaggctgaagcacaagaatctcttgaacacaggaggcaaaggttgcagtgagccgcgatcgcaccactacactccagcctgggcaacaggcaacagagcaagactccgtctcaaaaaaaaaaaaaaaaaaaaaggaaagaaaaaagaatggttcataaatccaggtggattgaaaataacaaattaattcagtctaatcatgtgcttctcctccagcaacaccatgcccaaaactattagctgtgaaaataatggtccaattacttaaaagctaagaatatccagaattagcagaaggccaaagggtagagagaagtgagagtgttgataagggggccattggggaattgaaacataggtttttggtgtattcagggagggaggcaaaataggaagaaactgaacaagtgggaagccaggaaggaagccagaacagggaggatgtgatgaaaaagaaaaacatgttacatggaaaggaaggaaatagtacaggtaggagaagtgacaagatagggctttgtgatcggaagtaaaatcacagattttagagtatgtgacttcagaaatgagtgctggggaggaacagaagtaaaggtcgttcactgtacctaatgtaaagctaccaagcatggcatcccaagaaagttgaagtcacccaggatgatggcaggatttgagtagagaagacacgtgtctgttgtcagttgtctaaatgagtataaaaccatgaacgaagagtcaaggggacaatggcagaaagaaagcagcacaactgggtggtatggtttcaacaagggggtagcctagcacaatggagtagaaatgagggtcagaaaatatttaaaccattttacatcaaagaaatgttttaattatcacaactgtcacaactggaaggccagaagtttgatgggttttgaaggtgaatgattggaagacgaccatggcatcaaactttgtttccttctgtattagtgcttagcccagagcttcaacctaacttgaccttgaggtcttcagatggcttccagtagcaatcagagctatgtgctccttgtttacgttcagcaaaagatagagaaactggtttctcatctaacactttcaaaaggagagaactttctgaaacacctacaggaaatttctccttgcatctctttgactggaattgagtcacataccaacttctaaaccaatcactgccaagaaaatagcacttcctttagacaagacacatccaactcttgagcctcatattacatcgtaacttctcaataggggaaggtgggagcagatgtcggggagtctaccgtaacctccaccactcacatgcatttgtgactacaaggtttcctcagcttcttttttaatgtggcaggtctagaatgggtaacaagtaatgacttcaattctctgaataaacgaagttttggctttctattgaaaaatcaagtttgcattggtgactctggacacactactcaatttctaacaatgcatagaaacagaactctcacaattgcaaatggagctaagagttacaagcacattttattccatcttgcaaaactgcagcaaccttgtggatctcttgccaagacaccaggaccgtctttctatgctttgcactaaaattccagagattctcctccagctacacatcctaaatgccatgctgcttgagtattaggcctctacctcctacctgctgaagctggagaccatgaataatatgcaggccatctagaagtccttacaggctcttgtagcaggcaaggaacaggtgcacagaccaaccaatgccagtacaaatacaagactttcactgtcctgattaaaaacatctggtggttcccagacagagaacaatgtcccaactccttagagctgcacaaaggactagttgcaaacagacacaaccaaacacaaccaagcatagcagcttcattgcccactttgcatcccaaatacgtgcttggcatccctgaatgctcctttacatctctatgcttgtgaagatcctttttcctctactaagaattccctccccctgcttttctaaccagtgattcccttttcttcttataggaaatgaaatattccgtgctctgaagttttcccagacacctcaagcagcagctcctctgttcctccgtgttcctgtagcaattcccacctgcctctatggaagtacttctcacactgttctgtgatcatgtgtttctgtacttgcctctcctaattagagtgagagcaacttcaagcaactttattcactgttttatttttagtgtctgaaaagtaaaaggtatctatgtttgtttacatatagatcatttatctttaaaaaatacttttaaagttataatttgctatgtgaaatcacttcttcctactttgatagctaattgtctattattcattatcagtataactcactatattaacgcacctagccaaactccacagcagcaacagccagatatttggcactttaaaataaaagtctagtattttctgactttttgaacttggttatttttaaaattctagctgggcacggaggctcacgcctgtaatcccagcactttgggaggctgagacgggcagatcacttgaggtcaggagtttgagaccagtctgaccaacatggtgaaagcccgtctctactaaaaatacaaaaattagccaggggtggtggcatgtgcctgtaatcccacctactcaggaggctgaggcaggagaatcacttgaacccaggagggggaggttgcagtgagctgagattgcaccactgcactccagcctggtgacagagcgagactctgtctttaaaaaaaaaaaaatgtaagtagttaagaacatctttgtgagtaaatcatttcattgctcatttacagcaggagatctggtatcatgcggctacaatttacgatatatgcagctgattgacatacagacacggtgctaaatgagatgaagtaaagcaaaccagtagggcaggatggaagtgtcaaaactgattggccggtataaattttcaaaatgtgtggtcagtattcctggaggccaaatccactgggtggcttgtttccaaaataacagtataaccttcttaagaaactgttttattgtataaaactactgcattaggaaaagttagtcactgtgtttacttcattcttctgctaacaaaagataaattatttatttttttagatgataaggaaatcttaaatgctgttctcagctgagagaggctgagagaacatcgggccagttactcccacaacatacttctgagagtacagaactcccatgtgatctaggattgctcttgtctggccttgttatttccaaattatgttgtccctgtctctgttaagggatggcatgagttgagctttagatcttgaagtaaggttcatctccgtttctgaatatcatgtgagaaacaaatgtaaaatgtaaagctttctcctcatttcattccaaatcctggtagtgaggaactgggaagggaaaggaggaaggtaacagtttttgagtccatattatgtgccaggcaaggcttcgagattgcagcttcccccaggatggagatagtatcttattgaactttaatatctagcacagtttctgacacgtaggcaggtgctcaatgaatacttattgactgaaacaatctaaatccatttcagatataatctcatttaatcctcacaaccacctcgaatttggaaatactttcttcatttaacagagaggttgagtaaattgcctcaggtcacactgaaaggcctggattacaaactaaggatgtaaaaatcaaagggcatctcaaagtcatccagaaaaatgcaactttttgtgttaatctgtctaggagctggggtagaaaaaagaaaaatgctgctttttatagatgaaacaaaacattcattgaattttagtgacttttttgtttcacaacacattgctgtaaaagtgaaaatcaagacaaacatacacagtctttcttaaaacattctagacagtgagtttgaccatacatacactaacatagaggattcagttctttttttttttttttttttttttgacacagggtctcactctgtcacccaggctggagtgcagtggcacaatctcagctcactacaacctctgcctcctgggttccagcaatcctcccacctcagcctcccatatagctgggaatacacgctggcaccacacgctggcaccaccacacccagctaatttttttgtattttttgtagagatgaggtttcaccacattgcccaggctggtctcaacgcttgagctcaagcgatcttcccacctcagtctctcaaagtgctgagattacaagtgtgggccaccacgcccggcctcaattcaatttttactgaatcactgctagaatcagtgattatttcatcataattttcctgcaatgtggcaggaacaaaaatgtctgggtgatagatctggcagctctgaatcccagcatgtggtgaagttaaaagatggcatcagaaatcataaaataggccgagagcgctggctcatgcctgtaattccgcacttttgggaggctgaggcaggtggatcacctgagatcaggagttcgacaccagcctggtcagcatggtgaaaccctgtctctactaaaaatacgaaagttagccgggcttggtggacatatgatataacaaataactccatacaaactagaaagaagaagaaggatattgataaagaaacaagagcaggagcaaacaacaaagtcacaaaaggtcttgatgtagaaaggtaaccatgaggaactccgtagggtggttgcatggaatatgtgggatgaaatcgtaggatataatattggaactgcagattattggatgtgaagggctccattcacatccacttgttaaaacaataatgacgattcttttaaatttttgtgccaagtatgcagaagaagacccaagtgcactggcagacccatggcatcagtacacatctgctattggctcacttcctctaatctccaggggctttttcccaaccttctggttccttctctgtcactgaccattatagaaggaaaatgaatccaataattaaatcttgacccaaactcaaaacaaataatttctttgtgatttttttgtttgcttttttttttttttttttttttttgagacggactcttgctctgttacccaggctggagtgcagtggcgcaatctcggctcactgcaacctccgcctcccagtgcaagcgattctcctgcctcagcctcccaagcagctgggactacaagcatgtgccaccataccttgctaatttttgtatttttagtagagatggggtttcaccatattggccaggctggtctcgaactcgtgaccttgtgatccacccgccttggcctcccaaagtgctgggattacaggcgtgagccaccacgcccagccaaaacaaataatttcaacagcataaaaacattttattctcctagtgttgtaacgaggtaagcattttcatatctgaatgaacctcccttcttcccgtgataggaagagttgatgtacaagaatttgattaaaaaaaaatacacaggagaggttatgttcagcctgcaggttaacaagatgggtggataggatagaaccctaaagcataattaaaacagcttaggtaattgtttttaaaccaagctttgagaactaaaaatgaaatttcatattaagaatattcatgtgtttttctgaacactgctagaaccagtgattatttttgaataggtaatataaattataatgttgcctaatagctgagaggcttttgggccaaatactcccaccgcatatatttcctaagagcatggaagtcccacaagcctatgtgtacctaacaatggcatgtgtacgtgacatcataatttcacttatcaagggaggaaatgagtcacacctgaagttgtgtcatgtcattgaagccaaacaatctgtcaatttcaaaattggggatgcagtttatttcacaaagagtgtgtaggctaaaaatgtacgtcctcttctagtctactgaagcaagagaagacagataccttctgctggtccacctccaaatctagttcttcatcttgagggatttgtgttacttcaaaacagcagaacaattctttctgccagaatgttctcttcagccatgggtatgcttctaggatttcatttcctgatattgtccttctcctcttttcgggcaggtgcacctgagtttcaaatatttcacatgtctaagttggtgcaggtaaactacattcttttccttttgctttctgatccagttatttcatttcctagcacattcttctatatttggccttatggagcatctgccaatgagaaacaaatgtctgccaaaagcatctgtgctccgaacaacctttgtccattcttatttcctctatttggataattccacctacgtttaatcctctcatcagcctaccgttcatctcaaacctgatttctatttatttttgtcctggctagctcctctttagtgcgtattatcctaccttttccgggggtctgcaaactttctaagcattatccctaataacaaatactttagaaactttcctacttaccacaaatgtatcattttgagaatcacgtaataggggctaatggattctgtgctaaatttccaagccttctcctgtctcaagtctgtccatattatctaaaccctccttgtatatagctttttcagcctttgaggctggttccccactgattattatttgctatctggagctttcagaggcacatctcaaaactcgccaagttccttgtttcatctagtaaagtcagtgtaatattacatctataatcttgcctctcttctgttattggagatcttccaggaatatttcttattatttccccatctttgaaagaagttaggtcaaattaaacagaaaaaggaatttattggaggtacacttggttgtccacatcttcaggaagactagagaactacattcagaataggcattaaaaagaggaggctacgccaccaaaaccacagccaaaaccaagccacagaacaaatccagtgaggataccactgcatcacagagccactgtggagaccatccatactgccagcattgaccctggccctaccactgtcttggttgccagcatgcagcccaacaccccacagccagaaagatgtccccactgcttttgacccttggtttctgtctccaggtctgagactcatgggtctgattgtcacacctaagtcatgggttcaggccccagcttcaggggaggttgagaggtaagtttcaagtctattcagattttacagtggaagatgaactctgcctcccagcaagaccaatagtatagatattccaaatgtaagaaaggaattcagataacagacaaacggtaggggaagtctattatgttttgactgctgtcatctgccttatggcatagccagtagacaactcatctgtgtgttgcactatagctagggcccttacaggaaatatgtcttttcactttccttcatctagcacggcagtttccaagccgtgctctgaggtaccccgacccccaccaggtgccacagagaactcagaagacccagcagcatattttaaattttcaaggacaggctgggtgcggtggctcaagcctgtaatcccagcactttgggaggtcgaagcaggcacatcacttgaggtcaagagatcgagaccagcttggccaacacggtgaaaccccatcgctactaaaaatacaaaaattagctgggtgtggtggcacggcctgtaatcccagctgctcaggagcctgaggcagaagaatcgcttgaacctgggtaggtggaggttgcagtgagctgaaactgcaccactgcattccagcctgggcaacagagtgagaccctatctcaaaaaagtaataataaaataaaatttaaaaaaataaatttttgaggacagcacagtggcatctaccagacaccactcagtctctacctcgaggtggttcgcagtttcattagatcagcctacattcccttcaaagccagccctttctttgcaaggctgggtgttcagcagtcactacaagtttttagaaagtgccatatgaaaaagcaatgtggaataggaaatgagagtgacatgttcattctgattccaaacttgtccggttggcagtgccccacaggcacacacgtcccattagtaactgtgttcattcaagaatgaaactaagtattacttgttctttatatttatatgtttgctttccaaatagctacttggttgttaaaacataaatatttaaaggtgtttgaacctactaacttaatacacgtaactgctagggttgttttggcaaggagtgaagggggagtgtttttgtttttgttttttggcccaggaatgttgtgaaaaaaattaaaacacaaatggcaccataaaccaaaagagtttgggaaactctgaaccagcacaatgtctattgattttttaaattaatgttttattcttcacagtcctgcattgttcaagagaagcctccactgtcctctctcaaagaataacttctgagtaaagacaaggaataatagaaagctattattatattattattatagcttcccactcatatgataggtggcaagtggatgactagaatttccaaaagcaaacaacacagctgggagagaccaggagacgaaaatatagaggagaatacaggcaaatgcagaaagtccccaaagaacaaagacagagtcagggaacctcccagccttctagaaaagggactcatgggccgggcgtggtggctcacacctgtaatcccaaccctttgggaggctgaggtgggcggatcacctgaggtcaggagttccagaccagtctggccaacacgacgaaatcccgtctctactaaaaatacaaaaattagctgggcatggtggcgcatgccaggcaggagaatcactagaacctggaaggcagagtttgcagtgagctgagatcatgccactgcactccaacctgggaaacagagtgagactctgtttcaaaaaaaaaaagaaaaatgtaaagggactcatgcacccattacctagcagaagtgcatggtatcactgctggcaagcacaaggatgtctatatatccagtagggagagtttgaataattcttctgtggagaaaatataagcatgcggcagaaaatgtccaactttggagacaagaaatttgcttattgatatttctaaaaacagtgtcatgtttaaggatgagtttctaaggagaatgcagataatgacagaagagctctaaaatcttacacgagtcattaaacccagttttctcttccatagaaagagtgtatgtacttggcatctagcctgctaaaactcttagtctgtgttggtctgagatttttggtgtcctcaaaagtgaattttatttgtttgtttgttgtttgttgttttttttttgtgacagggtctcactctgttacccaggctggagtgcagtggtatgatcacagctcactgcagccttgaccttccaggctcagatgatactcctacctcagcctcttgagtagctgggaccacaggcaagcaccaccatgctcaactgattttttttttttggtagaggtgaggtctcactatgctgcccagggtggttttgaactcctgggctcaagcgatcctcctgccttgccctcccaaagtgctgggattataggcatgagccaccatgctgagcctaggagtgaattttgtacatagaaaaatgatttcaatagttacttactaaaattaattcaatctattaaagctataaattttaaaaacctacttctttatttggcttttaaattctgtcttgctgagtctcttactctcgcttgctttgatgaaacccagctgccatgagcctgcagctcacaacaagagttggtccatatggagaggtccatatggtaaggaagtgagggaggcctccagccaacagccagtaaaaaactgaggccctcagtccaacaacccatgagcaagtgaatgctgcccaaaatcacatgaacgatctgggaagtggatccttcctcagtcaggctcttggatcatagtgactcctgctggatctccttgactgcaagatccttaggtagaggcatccaggtaagctgcagctggatttctatccaggggaaactgtgagttattttaaacttgagttttggagtcttttttttttttttgagatggagtcttgctctattgcccaggctggagtgcagtggcacgatctcagctcactgcaacctccatctcctgggttcaagcgattctcctgcctcagcctcctgagtagctgggcttataggcatgcactaccatgcccagctaatttttgtatttctttcttcttttttttttttttttttactagagacagggtttcatcatgttggccaggctggtcttgaactccacacctcaagtggtctgccctcctcagcctcccaaattgctaggattacaggcgtgagccaccatgcccagacttgagtaatttttatgcagtaacagataactaatacagaaactaaaaaagacatgacaggtaaatgcaatgtgtgaccctggactggatatcgtggggaggaagagatactaaaaggacatattggacaattgccaaatttgaatattgacagtatattaggtaataatattaaacttcttaataggattattggactgtggttatgtaaggaagtgtcccttttattatgaaattcacattgaagtatttagaaataaaggaaaatgatatctgcaattaactcttacatggttcagggaaaaattaacaataatatgcattataagtagaaagagtagtaaggcaaatgtgtcaaattgttaatttatgaatctggataaaggatacatatttaaaagatatgtgtacatttcttgcagctcatctgtaactttgaaagtattttttaaggttttttttaagtagtatagagaagcaatttgtcatttgtggcttaaacctaaaatgtgttgttacagaattttaaaattaattaagacgttcatttctttagtaagaaaaaagagacttatttttttcttttaataatgatagtctttctcttttggcgcttttaaaaccaaatacaagcataaatatattctgcccattgtattttcaggaaaaaattagatttggctaagttagattaaaacgctatgtataaatttctgtatttaaatcctacacttactccgaagtaaagagtgttgttcaagtaaggagactctaaagaagaagttgaaaggataacaatccaattctaaggcctaccttgtgcaaaaagtcaaaatttgacttcggtaccttcctgacattctatcttgacaacactttgtgacaacctgacttgtcaccgtattcaccttatttcctgtgctaatccaaggatattttctgattaaaattttatatcacaagaattttatgttattttcctcaccttaacacttttatcccatcacttgaatattttaccttttaatttttcacattttcaagtgagtgttgtggagacaaatgttgtccactatccttcacacccatcttcatttcttttctaccccctactcattctactttcttcttttaccttcttgggcgccttgctttcctttctctcccatggctttcttatctctttgacgccttccctcttgcttcctccatactaaccccacttgttatggtttggatctgagtctttgcccaaatctcatgtcaaattttaatctctgatgttggaggtggagcctggtgagaggcgattagattacgggggtggatttctcataaatggtgtcgcaccatccccttggcgctgttctcgtgatcatgagagacttctcctgcgatctggttgtttaaaagtgtgtagcgccgctcccctccccccacccccactcactttcttgctcctgctctggccatgtgatgtgcctgcttccctttcaccttctgccctgattgtaagcttcctgaggcctccccagaagctgagcagatgcccccatcgtgtttcctgtacagcctgcagaaccgtgaaccaattaaacctcttttctttacaaatttcccagtctcagatatttcttttttgttgtttgtttgtttttgtttttgtttttgttttttgagacagatcttgctctgtcacccaggctggagtgcagtggcgcgatctcggctcactgcaacctctgtctcccgggtgcaagcaattctcctgcttcagtctcccgtgtacctgggattacaggcatgtgccaccacacccggctaatttttgtatttttaatagagacgtggtttcacctttttggccaggctggtctcgaacttctgatttggggtgatccgcccacctcagcctcccaaagtgctgggattacaggtgtgagccaccacgcccggccatcagatattcctttataccaatgcaagaacagactgatacatcacccaaggccagctttcaccatttcatacctagatcacagcaatcacctcaaaactgatcctctgcctataggctctccaagcttccccaaacattacagaagcattcaattttagaagttcagaacctatacacctgcccattatatctggtttaaacttaccaagtttctatactatcatttccttacctctgagaggtaccaaaccaccaaaccagttttttttttttaatttgacttacctgagccagtgtttctctccacttttagggccacctatcactaatatatttaggaaaagacccattgcaggtttgttgtggagttctctgttcccagctgtttctccacattctgccatggcccacgtgtcacttagcactgtcagtggggacctggataatttcctttagtcttgtccatctcctcttccacacatcatcacacatagatgctgggagaaataataagaggaagcataaaatatgaaaagataaatttgaaactagcctctatatatgacttttttcccaacaaagtccaaccaaacatcatctaaggagttaaaggttttgtaggggtttccttgtgagcatactgtggaacagctgatctcgaactcctgggctcaggtgatcctcccacctcagcctctcaaagtgttaggattacagatgtgggccaccatgcctggctgactcttctttttataaaattgctttttcctcaactttttgttttgaaaagtcataagcctacagaaagttacaagaattaatttatacacctatatgaaatttgttagttgttaattttttcaaagttctcaatctctcttcccctctctctccctttctgaatcatttgaaaataaattacaggtatctagtcaggcatggtggctcaagcctgtaaacccagcactttgggaggctgaggcaggtggattacttgaggtcaagagttcgagaccagcctggccaacctggtgaaatctcatctccactaaaaatacaaaaattagccaggcgtggtggtgggtgcctgtaatcccagctccttgggaggctgaggcaggagagaattgcttgaacccaggaggcggaggttgcagcgagccaagatcacactattacacttcagcctgggtgacagagtgagactccatctcaataaataaataaataaataaataaataaataacagatatccttgtttaccccagcaagaatctaaaaacaaagacattctcttgaatattcttacataaccacaatacagtgatcaaaatcaggaagttttaacattgatacaacactacttttctgatattgttttctcaataatattctttctagccaagtttttgccatctagagtcacacattgcattcggttgccatgtctttagcctttttcactctgaaacacttcactgctctttctgtctttcgcggcattgtcatatttggagggtagtggtcagtagttttgtagaacagctctcgccttgggtttgtctgattatttccttatgctgaaatacagaccatgcattttggaaggaagagtacaggaataatgtgcccttctcagtgcatcgcatctggaggctcccctgacgtccgtttgtcacattattactgatgttaagcttaatcacttcttcacagtgaaagtatctctttcttcctttgtgactaattagtagtctgcttttatagcagctctgttcataattgccagaaactgaaataaattcaaacgtctttcagtggatgaatgaataaacaaagcaatgccttcatacactggaatacactgaacaataaaaaagaacaaactggccaggcatagtggctcatgcctgtaatcccagcactttgggaggctgaggcaggtggatcacctgaggtcaggagttcaagatcagcctggttaacatggtgaaacctgttctctactaaaattaaaaaattagctgggtgtggtggcgggcgcctataatctcagacacatgggaggctgaggcaggagaatcgcttgaactcgggagacggacgttgctgtgagccgagatcaagccactgcactccagcctccagcccggagacagagcaagactccatctcaaaaaaattaagccagcctcaaaagatatactgtatgattccatttatgtgacattcttcttgtaaagacaaaactatagtgacagagaagagatcagtggttgccaggagttagaggaggtatgactgtaaagacatagcatgaaagagtcgtaaggtaatagaactgtcctgtacgctgaatgtggtggtggttacataaatctatacttgtgttaaaattcataaaacaaggccaggtgtagtgactcatgcctgtaatcccaggtgtggaaaaaaaattcataaaatgatacaccaaaaaataagtcaattttatagttcagtgatttttctttttttttctttttttttcctgagacagattctcactctgttgcccaggccggagtgcagtggagtgcagtggagtgcagtggagcgcaacgaagcgtattggtgcgatcacagtttactgcaacctctgcctccctggctcaagcaatccacccccaacctaagcctcctgagtagctgggaccacaggcccacgatacctggctaatttttgtatttctagtacagacagggtttcgccatgttggccaggctgttctgaactcctgacctcaggcgatctgcctgcctcagcctcccaaagtgctgggattacaggtgtaaaccaccgcacctggctgataagttaattttacagtttgatgatttttctttttctttttctttttctttttttaagacggaatatcactctgttgccccagctggagtgcagtggagtgcagtggagtgcagtggagtgcagtgaagtgtggtggcatgatcatagttcattgcaacctctgcctccctggctcaagcaatacccccgacctcagcctcctgagtagctgagatcacgggcccgtaccaccatgcctggataatttctgtatttttttgtagagacatggtttcaccatattgcccaagctggtcttgaactcctggactcaagtaatctgcccacctcaacctcccaaagtgctgggattacaggtgtgagccaccatgcttggctgtatgtatgatgacgctttaaaataaaatttaaaataattcacctgtaagaagatacttgaagactctgtgaacattttgtttagctgataaacacaatcattacatatcactcaattctttctttcattctccacctgagcccaactgtccacttctatccaaacctttcagtgacataaggacttatagcacctgtagttatcctcctgtggttaatcattcccccattcctacagactatcaaattgacatttgcagggaccgtatcttaatcacaacctctagaacagtgttgttctcatataggcacgcttggagaatttatgaatgaatgtgacttggcagccacctcttatgccggcgcctatgcacctacagagacttcgtgaagccctggcacattgtttttaattgttaaatttctcagttatgggtataatagaggcattaaagagcatataagattgtcttctcattatggatacagactttcattcaggtaatcctattacacactttacctttgcatctgtctagtgcagccattagttggccacaaaatctgaaataaatatttcatattaaatttaaaaattggctgggccgtggtggctcacgcctgtaatcccagcactttgggaggccaaggtgggcagatcacgaggtcaagaaacaagaccatcctggctaacatggtgaataccctgtctctaataaaaatataaaaaattagctgggcgtggtggcacgtgcctgtagtcccagccactcgggaggctgaggcaggagaatcacttgaatctgagaggtggtggttgcagtgagcagagatcacgccgctgcctccagcctgggcgacagagggagactccgtctcaaaaaaaaaaaaattaaaaactatgatgtgcagatattttcccctagtatgaaagcttaagttattaaatctgtagaaaggctgaagaacttaatgaggatgttttatgttaataggataaatttaattgttaagatgttaaggtggtgtgttaaggtgacaaaggggaagtggaaggaaagagaactaacattactgggcacgtactacatgccagtatctgcttcaggtgctttaaaaacattctcccagtccccacccaactctgggacacacgctccattatgctcactgcagggtgtggatggaaaatgaaagggttagttctacccagaagcacctgcctaagatgccctgtgccccatcccttgggcccacctgacattagtggcactaatgtgaacagcggcatgcatgctgcaagtgccccaccttcagtgggtgctgtggtgtcccttggggacacccaagcaggccacagcctggaagtgcaggagagttagtaagtaacagtggatggaagtcagcagattaatgccccagcctccttgtccttcagtggaacaatgctgaagcacagtctatgaagttccacagctgatcccgagtgtaagtgggccttatttttccataatggtttccaactgagtagcacacactttataggctttctcacttccttgtctctctcttctcacacctcacttctgcttcctgggatcaatatcatcagtcaataggtaaatgcagatagactacctgcatccaagtcccttgccttagactctactttgcaagaacccaagctaagacatacaacaatattagtcagtctcctccttctttaataatgaaacccccagccaggcgtggtggctcgctcttgtaatcctagcactttgggaggccaaggcaggcagatcacctgaggtcaggagttcgagaccagtctggccaacatggtgaaaccccgtctctactaaaaatacaaaaattagctgggtgtggtggtgggctcctgtaatcccagctactcaggaggccgaggcaggagaatcgctttaacccaggaggtggaggttgcagtgagcggagattgcgccactgcactccaggctgggcaacagagtgaaactccatctcaaaataaaataaaataaaatttaaaaatattgaaacccccaggttttagctgtgcccaggaccattgagttatagattatattatcccagcatctttgcaaccagataagaccatgtaactttttgccaataggatataagtgcttttatttaacaagctttgcctttaaaagaaataagggtgtattttcttgttcctttgaccattcctgctgtctgggatgtagatgtaatggcaggagctagaacagccctcacagatccagagatagaagccatattttgaggatgggctgagctgtccatcctaccctaccctgttctgcttcactgaggactatttcaggagagaaaaacaaatgtctctcttcctttttttttttttttttttttttttgggagacggagtctcgttctgtcacccaggctggagtgcagtggcaggatcttggctcactgcaacctccgcctcccggttcaagcaatttctctgccctcagcctcctaagcagctgggattacaggcgcctgccaccacgcccagctaattttaacatctctcttcttaagccacagtattgtagggatctctctactaatgtagcatggcacacatatatggaaattggaacagtgcagagattagcgtggctcctgtgcaaggatgacacacaaatttgtgatgtgttccatacttttaacatagttagaaagaatgaataagatccagtgtttgatagcacagcagggtgaatatagtaaataataatttaattgtacacttaaaaaatcactaaaagagtataattagtctgtttgtaacacaaaggataaatgctggagggaatggaggccccgtattccatgatgtgattattacacactgcatgcctgtatcaaaacatctcatgaaccccataaatatgtacacttatatttactcaaaaaattttaaaaataaaataaagtagcgtggactgtatttttgcagaggataagatattggacaaagttacacagctttggagtaaggtgtaaagggaaggtttgcattcaaatctgtgggaatccacagctcaggctcttaagtgagcccttcatttattgtgggtgcgtgacttgcctcctatgtgttggggtagtaaaaaggctgaaaaatattgcattattgatgactcctcactgaaaagatttaccttcctttatccaacaggggagggaaaggttaattctgagttccatcaacatgcaaatgaggccagctgcaggtggcctacaccgataatcccagtgctttggggtcaaggcaggagtatcgcttgagcccaggagtttttgaccagcctgggtaagatggcaagacccccgtctccacaaaaaagaaagaagaagaaagaaaagaaagaaagaaagaacgaaagaaagaaagaaagaaggaaggaaggaaggaaggaaggaaggaaggaaggaaggaaggaaggaaggaaggaaagaaagaagaaggaaagaaagaagaaagaaagaaagaaagaagaaagaaagaaaaagaaagaaagaaagaaaagaaagaaagaaagaaagaaagaaagaaagaaagaaagaaagaaagaaagaaagaaagaaagaaagaatattagctgggcatggtggcacaggcctgtagtcccagctacacgggaggctgaggcagaagattgcttgagctcggaagttcgaggctgcagtgagctacaattgtactacctcgctccagcctgggttacagagcgagatcccatagaagaaggaaggaagggaggaaggaaggaaggaaggaaggaagggagggaggaagggagggagggagggaaataaaaatgaaaatggaagacgtcatgatgctatgaagaaagcttaaatctactgaggttagaattgccttttttgtaagaaccaaagcaaaatatttaaccgttgttatgagctaaattgtgcctcctttcccccatcccccatcccccgccccaaattcatatgttgaagccctaactccaagtaccttaaaatgtgactgtcattggaggtaaggtcatgaaagaggtaattaagttaaaatgaggccattaaggtgggccctaattcagtctgactggtgtccttataagaaaaggaaatttgcacacactgagagaccccagtatgcctgcatagagaaaagaccatgtgaagaggcagcaagcgagccaaggaaagaggcctcagaagaaaccaacctgccgggacttcaatcttggaccttcagcctccagaactgcgaggaatacatttctgttatttaagacacccagtcttgccgggcgcggtggctcacgcctctaatcccagcactttgggaggccgaggtaggcggatcacctgaggtcaggagtttgagaccagcctgacccacatggagaaaccccatctctactaaaaatacaaaattagccggacttggtggcgcatgcctgtaatcccagctacttgggaaggctgaggcaggagaatcgcttgaacctgggaggtgcaggttgcggtgagccaagattgtgccattgcactccagcctgggcaagagcaaaactctgtctcaaaaaaaaaaaaaaagacacccagtctgtgatactttattacagcagccctagcaaactaatagtcacttaccctcatcaaggaaggatatagcatgtttctaccggatgaataattaagtaaatgaataaatgaatgatcatggtgctatactgctagggaaacaacatgaacattttgctctataacatgccattcattaaaatacattttaattcagcttgactgagagagaagaatgctagcatgacctagcttagatatgtgtagtaatcaaaaagaacacaagagtctgtgagttatttcagttttgctaaacacaaaatgacattgtcctggatgcctctgtagccgagtcaagaaatctgaaatgatgaaacagcagaattcggaatttcaggctaagtggctgcatgaatttccaagagtgatgaggttctggaatgaaccattaaaatttcatcaaaagtaggccacagctggaggtcagaggaaaagattacatgaggttatacaatcctaaaagaacaatatttcatctttggtttttagtgaaccaattatttccatggttataaggaagcttcctatatttctaaataaagcaccttaaacacaaaatacccaaaatcgaattcatgttttttctcttggaattttctctctctttagagaggaatcgttttagttgccaataccattatcctcctagtcacccaaactggaatttcgtttctgtatagaactgaggacaaaactttctctgccatctctttccatggaagagtatcctgagtttctaggtaattcatgttaaagttgttaccatttgcaactatgtatctgtgtaaaaattatcttgccactatacaagaaaaaaaactcagatgtaaaagaattgcaatgctgaggctagtataagatacaattgccatccataatctctgtatcaaatttgcattcaaacatcataatgttcattgctttaatttataaaataaatttatcctaattaaatttccttttaatctaaacctaatttctatattaaaaagaatatcttttggccaggcgcagtggctcacgcctgtaatcccagcactttgggaggctgaggcaggcggatcacgaggtcaggagatcgcgaccatcctggctaacacagtgaaaccctgtctctactaaaaatacaaaaaaaaattagctgggcgtggtgacgggcacctgtagtcccagctactcgggaggctgaggcaggagaatggcgtgaacccgggaggcggagcttgcagtgagccgagatggagccactgccctccagcctgggcgacagacagagactttgtcacaaaaaaaaaaaaaaaagaaaagaaaagaaaagaaaatcttttaatgttggaatcccatgtaaatttttttttcttttttttttgagatggagtttcactcttgttgcccaggctggagttcaatggcacaatctccactcactgcaacctccacctcccaggttcaagtgattgtcgtgcctcagcctcccaagtagctgggattacaggtgcatgccaccacaccctgctaaattttttgtattgttagtagagacagggtttcaccatgttggccaggctggtcttgaactcctgacctcaggtgatctgcccacctcggcctcccaaagtgctgggattacaggcataaaccaccacacccagccggaatgccatataaaatttaatttgggaaaaatgtctgctgctataattatgtggaaaaaaagtcatttatctctagaataaaaagcaagatcacaagacaatagaatgactctacttgcctcttcagcccatcccttgctactcagtcacatcacacatagtctctggaaaatcatcttttttctcattccattcctccttctgccatcctctgtctacagtatcccttcgcctgcactttaggcccacaaacccttgaagattcaattcagatctcaccaaaaagtattttctggcccaccaagccctggccagaagtacctctttcaaacatctcttacgttaaacagcattatggaacactattgttttggactgagcttctgcactaggccccaagggaccagaccagaccaaaatggagtcacttgtgctaaatgccacttcatcaaaatgaaactttaaggaagtcgatagatctcaaaacagatcagtttttcctgaaaactggagattgcagtctgagtcagctataataaggacacttccgtttgcttaaactcatataaaaaagtaacctgaagtaacctaatgtttaccagtcaagctttttttttttctattgttctgtttccttgttcccaccttgtaaaacccactgttcagcagttgctcgtgagagctttcagtacattttatggaatgaaggctgccctgatttataaatcccaaataaatgcccatctttgatctataactaaatttgttgtaattttgtcttttgacacttaaaataacatatgttttcaatttttatatttacatttcccactaaagtgagtgtctggaggagagattgtgctagagatagcctagcacatggtggacatgcagaaatattggaaggaaggaaggaaggaaggaagggagggagggagggagggagggagggaaagagggaggagaggaaagagaaaaagagaaagaaagggagggaaggaggaagacaatttcatattaaagggctcgtaaatgaggcaagttttgctgtcatggcataattcgaaggaaatattagctgagctatatctcaaaattatgtttaatatccagctttcagcaaactgaatttcccaccataagatattctttactggggcaggggagggaggccaagaattagtactctgaaagcaaccatttaagatggaatactcctctgtatctaaaatatgacagatgtctccaagtcttcagaccgggttaaccagaggagagaagggcctgggaagaaaagacaaaaaagtaggcagtgagacccatttcattccagtttcccagagatggtgggagagaaaggacagaacagtacagactcatcaggaacaattcagtgcccagttacgacatgtttaaacactgccttttttgtgttttttcggcaatcctgagatgggagggtgccacacatttcttcatttggagaaactgagctcctaaaagattagatagaagtaaaactggtaacagcagccaaacttttcaatagtcgtctctctcctagagcaatgctctgtggaagggagagaaaactatgttgcctccctaatgataatgtgctgattctgtttgtttaactaaagctgcaccagattagcagaccataattacagctaaaatccttgtctctgatacagttgacagaatgtctgtttcactgagctgaactcccaggaaaggctttactcaaggttaagccaggctgcctgaaagcaatagtgctgtttcagtgctacactggatactttatctgagcagcgggatttcctacacttgggtttcacatggtttactttgatttcttggggcgataaggacgtttgctcctctttgaaaggttgtgttagtggccataccattgtaaaaccttaagaactttcttttgtgtctggatatgaagatatctgcctttttcttgatatacaactttactaggacttcttttagggaaatcccccctccatcccccagttctttccttgcctttcagctttgcagaacgcaatgaagtctgtcattaataatctttccttgaccaggcgcagtggctcacaactgtaatcccagcactttgggaggccaagacgtgtggatcacctgaggtcaggagtttgagaccagcctggccaacatggcgaaaccccttctcaactacaaaaacaaaaattagcccggcgtggtggcgggtagctggaatcccagctacccaggaggctgaggcagaagaatcgcttgaacccgggaggcgaagattgcagtgagccgagatccggccactgcactccaccctagatgacaagggtgaaactccatctcaaaataatagtaataataaatctttcctttatctagtcaactttgaatgttatgcttaattccttgagacctagaaatggaattcactgtgtttgtttgatcactggtggttttctatagtggatcgaggaatgttctcacctcttgccagaatcttttaaatagtcctgctctcttctctgtcaggtcgcttctctattcactctcatctactttgtgaatcataaggcaaattgtcaatgaatttgactaaaatttcaagaaataaatcaaggtgagaaaagtaagctgacaacagagttgagaataaaaggggaagtatttgactgggtctgttttgcttccccgcccaaaaccatcccagacgttccttaaatagagcccacagtttgtgggctttctaatgaatagtggccaagaggcagcctcacatttgaggcatgctattaccattttttcttcattccctctccttaattagggtctttaaagggaggctgccctcagattctgacaaacagtattagcttcctcataatgcaatgcctgatcctggagctatttttcaggatggtttgcactgagtctgtgacattgtctatatttctagaatgcaggaggaatacctcaacagagaattagctgtggaggttctaaaaagcctattcctgaaggcctgaagaactgattttaataacccataataatacgggagggagatagagttgactaattttcagtttcacagtttggctaatgcctacagtaagatgtattttacctgtaccaaacacacacacaccaaaaaattcatgaaacaatatttatcccttttccatgcaattccttctattttccattctaatttatttcagtttctaaatgcaaacctccacccactgaattgattctctcacactaaagagtggcaacccactgtttgaaaagcactcaatgggatgccctttatttttctaaccctgtaattcaatatagagagactctgaattgaggacaagcctgatgagtttgaggtatggaataaaggaatctgatcggctccgggtttgttgtgtttttaaatcttcctgtgtgttcattctcttcaccacagagaggactctattatctttgctcaaagagcagacagtgctctagctgttttcccctgcttagctttgatccctgcagccatgctcagcccttcccccaagccctcccttccagatggattgaggctgttgagactccaggggtgttcggggctgggagcctgctgagtgttccctgttcccacctccaatctgctccatcctccagctgcatttcattccggatctaccaggttaatgggattatcgttcttctctgttattctgttatttcatatagggtgaatcagtttgttcctgggacaatttttagatggttgctgagatgacaaaaatggatggggattttattttaggaataagtgttcttcatcagccaggatttaatctgggaagaatttattcactctcaaatgggttactttttgaagtgacttaaaaataagatttttttggctgggtgtggtggctcacacctgtaatccagcacttttggaatctgaggcagaaggattgcttgagcccaggaattcaaaaccagcctgggcaacatattgagacccagtctctattatttaaaaaaaaaaaatttaaataagattgttttatcagataaaagcaaagcataccttaaggcacaactcatgttttaatgcctatatcatcatcgaatcaaccatacaacattttagcttcaaattttaattttggttagaaagataaagtgatagactgattatatcatttattttattcattatattcaacaacatttgctcagtacttattggatacagagcacatttattgacctcaagatatctagacctttagaagggagttttttttaaatgcctacagatagccattatataaaataagattttaataagtgactatacacagtatagttcatagcctaatcatagtatctcctccttttcagaacttgtaagagtgaaaagagaaattactcattcctagtgtatctgttttttcaggacatgagattgccaaatttctgtattcttcattttaattaaatgcatgattgattgactgaatggatgctgactgtctatttggtgccatgtgctataaatgtgatgaaatgatcttcctattgatctttctttggtttcttgatgtttgtctcaaaagaattgacttcccaatacctggaacgcatgagggtggagagagactgaaaaatggaaagaaagaggcatgaaataaggctactggggactcgggtttttccttcctctctgattgtccaaatccaatagaaatataaagtgaggctgggtgcggtggctcatgcctgtaatcccagcagtttgggaggccaaggtgggtggatcacctgaggtcaggagtttgagaccagcttggccaacatggtgaaaccccatctctactaaaaatgcaaaaaattagccaggagtggtggaacacacttgtaatcccagctactcgggaggctaaggcaggagaatcgcttgatcctgggagacagaggttgcagtgagccgagatcacaccactgcactccagcctgggcaatagagcaagactccatcttggaaaaaaaaaaagacatataaagtgatataaaatataaaattttaaactatagtagctacaattgaaaaagtcaaaagaaacataaaatttatttttaacaacatatcttgtacaatctaatatatctaaaatattatctttacaatgtgaaatcaacataaaaaacattagtgagatattttacattctttcaggtatttttggactattatcttcaaaacctggcatgtattcttcactaacagcacatctcaattttgattaaccatatttcttgagttcagtaaccacaaatcactagtggctgtcatattgaacaacatagcctagataaagaagcaaaagtcaaggaaaatctagatagttaataaatttctttaatatttagaggaagggactcttacttcatggggtaggaggaaacctgaaaaccagttttctctttctgctgatggagaaatgggagttgccaactcaagatccactcctttctcttccagcctctcagacgtggggaaatgagatagagctggagctgaacctctcctacttctctccagcaccccagaattaaatctgctctgaggaaaataaaggcaactctacagtcctcacattagtatcatgacttgcagttgataaatgctttcatgtacaatatatcattggatatttaatcatactgtgacgtggtcagtcgaagtattactattctcactttatagatgaatgatctgggcctcagggagattaaatggcttgctccaaagtagcacagttagtatccaagtgttttgaaatttaacctagtgtatgtctcactaaaccagagctgcctggcaaaaggaagttaagaaaatatttacagaagtatgatttttttttcttctctggacacatttcatctactccacacccgccccccacaaaaaataaaagaaaagaaaaaaaccactggtgatcattttgcagaaataacctcttggccaattgagcttttaactgggtttttgtatttttttttaagttggacctcattgtctagtgtagcaatttagaacatctaattattgacagcaagtcagcatattacaaaggcagagtttttgcattggctctgaaatgtgttgcaatcatttttgtctgggaaaacaaacaaaagtggataggcagcatggttgttacatgagatgctggctgagtcccaggccctaggacattggcttacctaccaacaatacctccctttcaggcgatgccaactgttttatgagaagatcacagttctctggaagtgagcttttgtgttttgctctaatcagcaggatccaactttactactgtcatggagggaattacagtaattctaccaacttttgaggcaaccttcttctgacactgtgtgaaacagactgaaaagactctaaagatggagagagctcaatgcttgagaaaaggaattctgtcctttgaaaggtctctagaacaaagggtatgcaatatgtttatcacttcaacttcagaaacataataggctctagaaacacattctcattgatctgtttctactgcttctgttttttttttttctgcttcacccaatcgtcttcctatttttatctctttcattccactctggagccatgttgcttggtcaggccacccttcaaaataaatgattttttccctctttcatgttatacctgttttcttaattcttggctgttacttttctcagttaacctttggcaaatcataatgaaattaaatttagctggttgtagagagaaagagtcattgtagaagttgggatggtctggaagtgaattaaaaagtattttgatagccctcagaatgtggacaaaaatagtaaaaatccagctgggagtcagtgtatctattttatgtcatttgcagtaaattgttgggcgtctccttgtagctgccacaataatgctaatgatggtgacttcttgctcgaagtgctgagtgttgaatcctttgccccagttatgtgccacatactgatttccttagcagtagacaaatactggaaacacaaaaggcagaagccatgtcctactaagccattccctttgtctagtttatcactcagttctgtctattctttccttcctctgtgggaaatggggagttcataaatggtaataacaaacttgcagaaaaatgttaagatagaaacttttgtagcagccagcatttttcttagaggaggtcaaagcataaagaaataaactgatcagcctctgttcctatctcccccaaaaactccttctctagatatcctactctcagaaactagtaatcaggcattatgaaaaattacttaatccactgggccaattcatgtagcttatcagctatctgcctttagactgaaaaaaaaaatagccaaattatttacttgcaaatccagaaagtaggtgaagttctttagcagtttaatgttactataacagtctaattcacaggagcacacacatttataaaattgtcatctgcacgagttggcacacccacatgagagaaatgtcatccatgacaatggggctatcaggtcttttatagcatacattctactataaatttatagggatcaaggaaaaacttctctttgccatctgaaggcttactgaaaaatcaactgacaaaaggcagattaataggcaaaatggcctacagatgtgttagtgagcatgagggagaatcacagaatgattgtccaatatcccagtgaggtacagatggttgtatatacttcttaggggaaagacagatagagacgtgtagatgatttttaggggatttcgatgggcctggagaacctacagtggcctgggataaagtcttttgggccagcagagcagacaatagtttgtgaccagtctgtccaggcgtgttgatagaattcagtctttcttcccatgagttcagttaataaaaactcagggaaggggccagaagtaattgttttcttcattgtcaggtccaaaatgtaggcaaataaggaatttcaggggacaacttcatcctgcaaggaggattaagagacaggacagggaggaggtccaagagaccttgaggcttctttttcagttcagcatgtcaaagtgccatattttggggtatccgtttctaagctctaacacattcaaagtacctcaaaagaaccagatgctgctaagatagttcacagggaagattctgtcctcttctctgtatcctctatttaaaattcaagtggtttctctttctaggctaccccataactttgttggttaaaggatgtgctactcatttaaaatgtcaaattacaaagccagagaactggcctacctgattcacatactttgcctttctcaatccctgtaatctcagcatcatacattctatcttttcaacgtgcatattaaaaggtatcttaaagactatcttactcggactgaaacgcaagagtatctgcgaacactgattcagcttgcaaaatacatagaaaagtagcaagaaaaatgatgtaacatcccatgtagtcggcatactggcctagtttcaagaccgaaagcagtctgaaaatgtctgaaaaaagtcggaaaatgtgtgtgtgtgtgtgtgtgtgtgtgtgtgtgtgtgtgtgtgtgtgtatgtgcagccatgcctaacagctcatgtttagctttcttttttttttccttttcttcttttttatacagagtcttattctgtcacctaggctggagtacagtggtgcaatcacagctcactgcagcctcgatctcctggactcaactaatcctcctgcctcagccttctgggtagttgagactacaggtacatgccaccacagtcccctaatcttttaatttttatttttagtagagatgaggtctcactatgttgccgaggctggtcttttttttttttttttttgagacagagtcttgctgtgttgcccaggctggagtgcagtggcttgatctcggctcactgcaacctccgcctcctgggttcaagcaattctctgcctcacctcctgagtagctgggattacaagcacctgccaccacagctggctaattttttttgtatttttagtagagacagggtttcaccatcttggccaggctggtcttgaactcctgaccttgtgatccacccacctcggcctcccaaagtgctgggattacaggcatgagccaccgtgcccggccacccaggctggtcttgaacttctggcctcaagcaatcctctcgcctcagccttccaaagtgctgagattacaggcatgagccacccagcccactcacgtttggctttctttttcctgttttttttaaacttcaacttttatttcagatacagaggtagatgtgctggttagttgcatgggaatattgcatgatgctgaggtttggggttcgaattccatcacccaggtagtaagcataccacaacataggtttttcaaccctcccactccccaccttgtaatagtctgtagtgtcttttcccatatttatgtccacgtgtgattagcttttcccatatttatgtccatgtgtgattagctaggtcacttcccagaatgttatatacccacacacattgagaaagtttttggcactggaattgccctgggtgattgtgttggaacaggtgccaaaacagtaacgttcttacctgaaacactgctggggtttgcaggaaggcactgatccacccttcctacagcttgttcatgccaaaaaatacaaggaaagctgcagctccccgaaggagagggagagaaactcttgcctctttttaaatgagtagactaagggccgggggcggtggctcacacttgtaatcccagcactttgggaggccgaggtgagcagatcacaaggtcaggagatcgagaccatcctggctaacatggtgaaaccccgtctctactaaaaatacaaaaaattagccgggcgtggtggcgggcgcctgtagtcccagctactcgggaggctgaggcaggagaatggcgtgaacccgggaggcggagcttgcagtgagccgagatcgcaccaccgcactccatcctgggcgacagagccagactccgtctcaaaaagaaaaaaagttataaactaagatgaagggaaaacataacacaaatatttttcaaggagtagtaagatattagagccctaaaagatttgatgggcacatttgtcttgcttgtttcaccctcatcatcatcatacgagtttatttcatttaaaaaacagaaaacatagagaagcatagaaagcattccaatcccccataattccgcctcctaaacatgcatacatttatagactacggttccatgggacctgatatatatggtacctgatacacatggataaatttttcctaccaaaatatcataaattatattgtgttgtagaaattgtctttgttacctaacaacaaatcactatgtcagtatataaatatttaccacatcattggttgttttttggggtgcttttgttgttgttgttgttgttgttgttttgagacaggatctctctgtggtgctcaggctggagtgcagtggcgtgatctcagttcaccgcaacctctacctcctgggctcaagcaatcctcccacctcagcctcctgaatagctggaatcacagatgtgccaccatgcctggctaattgtttgtatttttggtagagacagggtttcaccatgttgcccaggctggcctccaactcctgagctcaagcaatcctcccaccttggcctcccaaagtgctgtgattacaggcctgagccactgcgcccagcataccacatcattgttaatgggtacatagtattctcttaagtggatgtattataagttatttaactaataccctatgattgattgcttgaattcttttcaacttctataattataattaattctacaataaacagccttctggccaggtgcagtggctcacgcctgtaatcctaacactttgggaggctgaagaggatgaattacctgaggtcaggagttcaagaacagcctagccaacatggtgaaaccccgtctctactaaaaacacaagattagctggctgtggcagcacatgcctgtaatcccagctacttgggagactgaggcaggaaaatcgcatgaacccaggaggcggaggttgcagtgagctgagatcaggccattgcactccagcctgggtgataaagcgacactctgtctcaaaaataaataaataaaaattaattagttaattaacaaacccagatttcaggtgtctcctaatttgagggaccaggagggaacaccaagaccatatatagctgcatttgtgttcatcccttaccttatgactaccaggatacgtgaactcagcctgtctttgaagctcttaaataatcctctaatgtaaaaacctcagtgaacatgtaaacatcaccggagttttcatagagaaggtggaaaacaggttttgcaaaacacatctcacagaaaaaaatccctcatagacatgtctgttcttactcattatctgttatatctgggactggggtagagggtggctggcaaacaaatcagttcttctgttcaacttgcttcctcaaacttgccttgatgctcagccaaacaaagggccctccagttaccagaaattgccctcctcagaagaaaatttagcaatcatctaaacttgttttaaacatgccctttgagatatcacgcccagctccagcagtttgtattagagtatttcttcagatccttgtctgttaaatccttcaagagtgttaacttttcttcacctagtttctgcccatttcttgtcaattttctttctagtttttttttcttatctttctttctgttttttgtttgtttgtttgttttggttttggttttgggtttttttcgagacagtcttgtgctatattgcccaagctgatctcaaactcctgagctagggcaatcctcccacctcagcctcctgagtagctgggattacagatgtgtggcatcatgctcagctctttttctaataattttttcttctctggttgctactgcagttggtaactttactccactatattatctaatcaagccttctttatataaagaaaaactattgatttagatacttttgtgtgtgtgaagtcaactagcttactgatttatctcattgtttcttctgttttaattgatatattattatctgcaaacaataattgtgtctcctctttcaagtattcatacctcttactactttctcacgtgtaattacattgagtaattacattgagtagtaccactaaattaggagtactagtagtgatgatggacttctttgccttccattgcaaaatcttttaatgcttccatgaaaaacgatactggctttgacatatagtttaaacatatacacacatacacacgcaattttaatttcaaagactttacatttattcctatttagtgatggtttaagttccttatctgtatatttgctttgtttgcttttatttttaaactaggaagaaatactggatttgtcaaagtcctttgagataccagtctactgatccatactaaatttgaattatcttctttttaaacacttaaataaacttagacatgtttatgggctgttcattctattgtactgatctacaagtcatttctaacaccaataaagtgcaggtctatttattgaacattttaacatattataatagctagaaatttcagtccttctattttttttttttttttttttttttttttgagtcggagtctcgctctgttgcccaggctggagtgcagtggcactatcttggctcactgcaagctccacctcccaggttcacgccattctcctgcctcagcctcccgagtagctgggactacaggtgcccgctgccatgcctggctaatttttgtattttttttttagtagacacggggtttcacctttttagccaggatggtcttgatctcctgacctcgtaatctgcccacctcagcctcccaaagtgccgggattacaggcatgaaccacagtgcccggcgtccttctatttttctaatctttaaggttttctaggtagggcatggtggctgtaatcccagcactttgggaggccaaggtggaagaatcgcttgagctcaggagtttgggaccaccctgagcaacatagtgagaccccatctcataaaaaataaagataaaataaaataataaaattaattaatttgaaaaatattttcttgcttcatgtgtcttaatattctaaccattattatattactatcatgtagacaggcaaaattaataagatagttagaaaataatacaaaataatttggggcacttttatttaaaaattaaaatgcatccagtaccataaattccaggagaggcagaaatcaatatgagcttaatgagtgatgaaaattaccacagatttattttttgcagatacagaagatgagagagagaaaaagagagaaattacagagtgacggagaaggcagacatcatgcaacatgctcaagggctattcattttaagctgaaacatacatgtgtagaaagcatccttgtacttataatcccaatgactatgaagaaaaataatttagccaaatagttcctagaacaggaaaaataaggaattatattttgagataagaagttaagctctagtataacaatgatatgggtcaaagaaaaatgaaaacaaattttaaaaacgttgcaacatgaataaaagtttcaccaaatcgggagtctattataagcatgttttgagttattttctttcccaaagacttcatttttgtttcaatttatttcagtagtatacacttctgaaaatatttaactaatgtcgtactggttctcgtaaaaggtgaggtggagcaattccattaagctatagtgaggtgaagagagaatatctggtgaatgaatttgaaataagctccttcgcgatatgccccttccataacctctgtatccttgtcatcccaaactgcccacatttcgctgaactccttgcacttctcagaggacatcttacctgtcaacccacggtatcagttggctgggggaggtccccaaatactggtgagaccctgacccctgctaatgtccaggcacctgacaccgatatagaaggaatccaaagacgacgagtcagaaaacagtgactgtatgaagatttactgcaaagtgaatctccacggaagtgcagttcaggcctactcaagagagagacactcccagaggggcttggggctgctatctttatgggtttctttagccaaagggtgaaatattcatgaagatttctggaaaaaaggtgaagatttcttggaactgtggtgccacccatttttacaccaaatatgggtgttcccagaagtgtcatggcattggtgggtatgtaatttagtatgttaatgaatgtacagtgaagtcctcatgagacctaggtgaaatccagcaccatgttgggtccagtcagcctcagccagcttggtctacaccctggtttgcaaagtatcagcccctagtttatgcagctatttcaacagtttcctttttgctagtcatgtgaaactgctgcctagaattttctattctcctaccaccaccctgtattattcctgtctcactacccttcaacttccacccccttttcctctagatacttgtatagtactcttcagacataggagtgtggaaatcgtcccctgcgtcccagtctgagacaggtagttcttttttttgccatcgcatctcatgcacgcctctctgaatcactggttttcttgactgtctccctcagcagagacaccacggaaggcatcttaattgtacattcagcatttagcatatggaagcattaaagatgttatgcaaaaaacataagcttcttttttaacttcttaagaaatgtgggctcaagctctgctccctactgtatttatttttcttaatacccttgtggttaaaatgtcacataacgatgtcacataatctcactaatatcatatgttatgggtatgatattaatagtcatattcaaactgttaatgaatcacatcaagaaagcccgtctcctttagtgtcttataaaaattatagaggaaaaacagtgcaagtcagtaagtataatattaaggggccgggtgtggtggctcacgcctataatcccagcactttggaaggccgaggccagcgaatcatgtgaggttaagagttcgagaccagcctaacatactgaaaccccatctctattaaaaatacaaaaatcagccaggcgtagtggcgggcgcctgtaatcccagctactcaggaggatgaggaggagaatcgcttgaacccgggaggcagaggttgcagaggttgcagtgagctgagatcgcgccattgcactccagcccgtctgacagagcaagaatatgtaaaaaaaaaaaaaaaaaaaaaaaaagaataagggaatcaaccgggctcagtggctcatgactgaaatcccaatactttgggaggctgaggcaggaggatcacttgagcccagaagtttgatcccaatctgggcaacacagggagatccccgtctctacaaaaatttttttaaaaaaagagaataagggaatcataaagttggaaaggtaggtgaaaatcattcttcctgtggttcctaactctggctgagcttttaataaaatgccaacaacgcccaggtcttatgctaagaaaatttgattacacttgtcttatgtggtgaaggagtagctgtgtatgtgcgggtgtgtgcatgtgtgcgcgtgtgtgtgcgtgtgtgcatgtgtgtagagacaggggctcattatgttgctcaggctggtgtcaaactcctgagctcaagcaatccacctgcctcagcctcccacggtgctgggattacaggcataagccagcaggcccgggtaagcagtatttttttaaagttccccaaatacttctaatatgcacccagaattgaggacaccccatctaatcctactccatgttgcctaatcattttcctgatgaggcaacatgagaggtgacgtcacttaggagagtgagtaagggacacactaaaaataactaaagttactcatcagatcatagattcattatggaaggaatgatcagaaaatcaagagattgggaagaattggcttgtttagatgaccagtacgggtgagattaactagatggaaagtaaagcaaccgcaagctgtatgtggtggcacttcaaataggagtagtgggaactaacatgaaaagaaaaaaatgattacagttggcaggcaaaggagggatctgtgcaggaaataacttggctgaataaatagaatgagctaagactagattatccaaacacgagattcatttctaaatcagacagagctgaacttaacaacaactctatctacttgtagtttcctctgtataaattttacactgctagtgagcatggatttacagttatctgcaaatcttactcctgaaaaatgagaatatagacagctccctgatttggaggaactgagaatggaaattacattgttgcatgaggtcaaatatttctcaggtttatcttacacatttagaatattaaaaaaaataaattggggatagcaatgagggagatcaatgcaggaggtcaaccgatatttattggcagaagagcaagggaaaaaatgtgatggtgttttgttttccatcaacagctccaatctcttcatcctccctccaagccaactctattcccagatggtctttaaattctaatatttaaagaaatatagtctttccaggagcagtagctcgcgcctgtaggaaggttgcttgaggccaggagtttgaaaccagcctaggcaacatggtgagactcaaatcttttttttttttctgagacagagtctccctctgtcacccatgctggagtgcaggggtgcgatcacggctgactataacctccgtctcctgggttcaagcgattctcctgcctcagcttcccgagtagctagaattacaggcgtacgccgccacacctagctaatttttatatttttaatagagacggggtttcaccatgttggtgaggctggtctggaactcctgacctcaggtgatctgccggcctcggcctctgaaagtgctgggattacaggcataagccaccactcccgaacaagactgaaatctaaaataattttaaaaataaataaataaataaataaaaatgttacagctcagctcttttagaatttgtctaacagattgcttagtcttcaccagggcaccccctacccccaccaccccaccaaaaaatgttttatccaggataaaactgcttgccttattattttcttaatttcatgctgtaatcgtgtatacagtttcccaacttttttagcattaatctttcaaaatacaattatctcagtttgtgaccctgatcatatgtcaagtaatataattttgtgactcatactttcggaatattttgtcttagcttcctgatttttatacacacatatacaaagaaatctccatttttcttttctttattcttcttttatttatttatttacgtatttttgaagatggggtctcactgtgttgcccagactgggtgtggctggaatggtgtgagacttagaaattactgtagatgttgttcatccaagttgtcataatgaaaattgtgagacattcaaatcactcttttttatgttatgaaccatgtgcttcacaaacccagatctcaaagctgtgtagtaatcctactgtagattcaatctaaatgtcagcctatgcaaatacagactatttgatatagaaatattcccacccaaatattacttcccaataattgtaatagtaagcccatacaaaaataaagcatcaaagactttttagctgcctagctaccatccactctcttttctataggttttcaaaagtctaatggttccaacttctaatggactcagcattcgtcagggaaactagctcccaatactccttgacccttgcaccgtaattcataatgcttccatttttttgctaaaagaatcatcaatggctcttgaattttttttttttttttttttttttttttttttttttttgcacatatccatccacaaatgtccctgttccattctccccacgggtacagtgatatctaataatgagttacaaattttttttgtttcctctttaataaatttagtactggtgtggctctgaataattactaaacagccaattttacgtctttaaagtatgtgtatccaggccgggcgcggtggctcactcctgtaatcccagcactttgggaggccgaggtgggcggatcataaggtcaggagatcgagaccatcctggctaacacagtgaaacctcgtttctactaaaaatacaaaaaatcagctgggcgtggtggcgggcgcctgtagtcccagctactcgggaggctgaggcaggagaatggtgtgaacccgggaggcggagcttgcagtgagccgagatcgcgccactgcactccagcctgggcgacagagagagacctcgtctcaaaaaaaaaaaaaaaaaaaaaaaaattgcgtccacctcttccttatatgaaccgttgtgaagactagggataaagtaagtgaagagcccggatctatctgaaacactcttatcaattgttagctgttatttttactgttttcccctatattcttttatatgtttagtgtcttacaggaagaggttaaaaagtgcaggggtgggggcaataggggacagggagaatataataaaggattaagtaattaaatagaagataggaaagggtgctccaaaagcaagtgtccgttccagaacttgcttcctagtaaagcaaggtcctcaggccatcttctctgaaccttgattccactgtattttcagtgtgcgaacagtgatttaaatcagtccattttagctgtcaaactcataccgtttgagaagattcataaccccagagagagcgcttacgaaggagggattaacatggcaaacacatgcgcaaactccagatggctgagctgagacatgtttgggggaaagtctctctcctgactgtggaggaaatgctatatgggaggaaaactagtgtcttttgtgataaaggatggtcagttagtcactgggtcacaaagcctgttctacaaatcattcaatttaagaagcatttgggacccctcgaaagtttttttgtttgtttttgagacgaagtttctctcactgttgctgtggctggaatacaacggtgcagtctcggcttaccgcaacctcccgcgcacggtccaaaacacattttcgtgctgcatgggccgggaatcgaacccgggcctcccgcgtggcaggcgagaattctaccactgaaccacccatgcaccgatagaagagttggggaaaagcagtaacatgattggaacgcgactggaaggtgttctttgttgcaagagactagataatggagaaggaagatgataatattttggtcacttggctgggcatggtggctcatgcctgtaatctcagcactttgggaggccgagtggggaggattgcttgagcccaggagttcgagaccagcctgggcaacacagggagactcttgtctctaaaaaaaaaaactaaaaaaaaagaaaatgagccgggcatggtggcacgtgcctgtagtcccagctactcaggagcctgaggagggaggattgcttgagcctgggaggtcaaggctgcagcgagctgtggtcatgccacttgcaatccagcctaggtgacagagtgagacactgcctcaacagcaacaaaaaagttggtcacttgaagtattgctacttattgattcatgatacaattaaatgttgcctctccagattgtttgggggaattggggggttttttgagaataaagtgctccagatagccgtgtgagtgcctcttgaataaacaccagtttttttaaaaattgaattcatttatataaaaatataaattgcattaaatgctatttatattaaatgctttcctgccatcttaagcagaatgcgctgaataataccttactgaggactcagcaccgtgacagccattgctgattattgcagtgaactgtgattcagtgatgtgggacacaccgtcaaggaagtgagtgcaatgagagctccacatacacaaagttcagaaaaaaacaaagcacaggaggctgtttgctttctaactactcgtttcacccctggactctggtgtactctccagcatgccacacttcaggaaggatattggcaaagtggagtattctagctaagaaaagaagctaggatggtaagcgctattgaaacaaggttcagccagcaaaatgtctgaaagcgttagagaagcttaacttagagaaaacttatatataaatatttaaatgttggtagtattgtcttgtgacgatgccttgaatagaaacctgtaaatatcaacctggtctctactaaaactacaaaaattagccaggcgtggtggtgcaagccggtggtcccagctattcaggaggctgaggcaggagaatcgcttgaacctgggaggcggaggctgcagtgagccgagatcgcgccattgcactccagcctggacaacagagcgagactctgtctcaaaaaaaagaaaaaagaaagagagaaggggtggggagagagaggaataaagaaaactgtaaatatctaatagaatactaagactaattggtaaaaatcattacagaaaagcagattttgggccggacgcagtcgctcacgcctgtaatcccaacactttgggaggccgaggctggcggatcacctgaggttgggagttcgagaccaccctgaccaacatggagaaaccccgtctctactaaaaacacaaaattagtcgggtatggtggcacatgcctgtaatcccagctactcgggaggctgaggcaggagaatcgcttgaacccaggaggcggaggttgcggtgagccggagatcgcgccattgcactccagcctgggcaacaagaacgaaactccgtctcaaaaaaaaaaagaaaagcggattttgattcaatatgaaagaaactcctctttataattcattttgattcataatttatgtgcaagatcttacttggtttcgcaggtaatggaataatgagcgaacaaaagtcccaaactcaaaaaagacattaacctagggtagctggaatggagagtgcacgaggcgaggagcaatgagagttggagaagcaaatgggactagatcatggagggcctggaaaggtaggattgttttaaacaagtaactggaagtgataaatcattttaaaatatttttaactcacattttaattacaaagctaattattataaaagtaaaataagtttattaaaattttaaatatatcaaaatatattatgtaaaagtgaaagttcaccctaaccccaatttacagaggtacctgtgagtcgtttagcccgtgtctttttttttttgagacagagtttcgcccttgcccaggctggagtgcagtggtgccatctcggctcactgcagcctccgcctcctgggttcaagcaattctcctgcttcagcctcctgagtagccgggattacaggcgcccaccaccatgcctggctaattttttttagttgagacggggttccgcatgttggtcaggctggtctcaaactcctggcctttcaggtaatccacccgccttggcctcccaaagtgctgggattacaggcgtgagtcactgtgcctggttttttgttttttggtttttttttttttgagatggagtctcactctgtcacccaggctggagtgcagtggcacaatctcggctcacagcaacctcagcctccggggttcaagtagctgggattacaggcacgtgccaccatgccaggataatttttgtatttttagtagagacagggtttcgccatgttggccggggtggtctcgaactcctgacctcaagtgattcaccagcctccacctcccaaagtgctgggattacaggtgtgagccaccacacccggcccctggcctgtgcctttacttgacctttttgttgctatgtgttccacatctataaaatgaggatcataatagtacctacccaatagaggcaacatgagaattaaattaattaccgccaactccataaaggcagggattttgtttgatttaggggttttcaacctctgtactactgatattttaggctgaataatttccggtagtggaaagaggggctggtgtcctgcacactgtgggttgtgtagcagcatctctggcttctacccacttctacctgcaacaaaaactatttatagacatggccaaatgtcctctggggggcaaaatcacccaggttgaaaaccactggtctaatttactgctgagagcctgtcacccagcacagcatgcaataaatatttgtcgaattgaatgaatgaagtgaatgcatataggaagccctcagtaagtgttacctatttttattatactattttccaactatataaatttctacataagtgggatccaattatgtgtacttcaaggcaaattgcattttttctctaacaatctaccttggtcatacttttacatcaccaccaccattttatacagttgtatctcgattgctttctatggcgtgaaagtagttttataattcatttattcaattcattattgatgtgcatataggctaatttcaatttgttgttataaataatgctacaaagaacatttttcattatgaatttttatttactgtcacatccggggctatgcaatgtatcatgccctaatttggaaagggattttgtattaggcaggtttctccagagaaacagaatcaataggatgtatatacacacaaggaaacttgtttataaagaaattgtcttacacaattatgggggttggcaagtccaaaatctgcagggtagaccagctggctgaagacccaggaaagagttgatgctgcagtccaagtccgaaggtcatctgctacagattccctttcgcggcaggtagctcagtctttcattctattcaagccatcaactgattggatgagacttacccacattaggaagagtaatctgggccaggcgtgatggctcacacctgtaattccagcactttgggaggccaaggcacgtggatcccttgagctcaggagtttgagaccagcctgggcaacgtggcaaaatcccaattctacaaaaaatacaaaaattagctgggcatggaggcgcatgccttgtggtcccagctattcacaaggctgaggtgggaggatcgtttgatcccaggaggtcgaggctgcagtgagctgagattgtgccactgccctccagtctgggcgacagagcgagactccatctcaaaaaatatataagtaaattaaataaaataaaatacaaacacagaattagccagttgtagtggcacgctcctgtaatcccatgtactcaggaggctgagggaagagaattgcttgaactcaggaggtgggggttgcagtgagacgagatctgccactgcactccagcttgggcgacaaagcaagaatctgtctcagagggtggaggtggggggtggggaaagaactacctgggactgcatactttataaagaaaataggtttaattgacttacagttctgcatggctgcggagatctcaggaaactttcaatcatggtagaaggtgaaggagaagcaagcaccttcctcatgaggtggcaggagagacagaggatgagaaatgctacacttttaaacgatcagatctcatgagaactcactatcacaagaacagcatgggggaaaccacccccatgatccaatcacctcccaccaggtcccaccctcaacatgtggggattacagttagagatgagatttgagtggggacacaaagccaaaccatatcatcctgtcttaaaaatgaaaaaagtaatggtaacctgtcttattcaaagtccaccaacttgaatgtcaatttcatccaaaaacacgctctcagaaacatccagaataatgtttgatcatatatctgggtactacgacccagccaagttaaagaaaataaaattagcccagtgcagtagctcacgcctgtaatcccagcattttgggaggctgaggcgggtagattgcttgagcccaggagttcaagaccagcttggacaacatggagaaactccgtttctacaaagagataaaaaattagcagggcatggtggcgcacacctgtagtccctgctattaaggaggctgagatggaaggattgcttgagcctgggagattgaggctacagggtgctgtgattgtgctactgcactccagcctggatgattgagtgagagcctgtctcaaaaaaaaaaaaaaaaatccattccaaatcaggagtgctggtaaaaaaaaaaaagaaaaaagaaaatttatcacacataaaattaatcatcacagattccttgccaacacatcagcagaactgtctgaccacccaaaaagagaactgttgatgtgaattgtatgctaaccaggggcctggactggacaacctctctatgcacgtggggttctgagtctggaaagagatgccatctgagaatggtgacatatgtctttctctttcttcctaaccgtggctacagactagtctatttttgtggtttatctgcctactgtttagaattattctgttttcttggggctgtcaggcactcaactgacacttcttgatgctattgctgtgtctgccttgagcagctaatgatggatgtgaaaacccttttataattgttcattccaaaggaaatgtgcagccacatgctcctgtggtctcctgtgggctaaataaaccctgataaccaagcttattatcattatgtctaaaattaaagtaaacaaataatgagtgagggcttgagtggtttattgtggttgaaaagtactgactgacttaacgcatgaatcttataacacctatttatatgggtaaagatttggagggttattctagtttcccatctgggttccagatatgtgagattgctgggtgggagaatgttatagattgtaggtttgttgtcttaaggcaggtagctgtcatttctgcctaaattatctgtaaggcaagaaaccaaatatataaattaataccataaataagcaaacaaataattctctaatctcaatcaatacttccctacttgtgaactgaagaattaatacagtctctttgtttgctgcttggcatgagtttcctttacctttaaaattaggtttgtgttcatgaaacaaggttagaaatttagggaagggaagaaatctactatttaaaaatatatgactatttatttttagctaccactttttagcacctaggtattaaaatacataataattaggagctaagtgtatcccataatctgtcatcattcgctcacttcaagaggcccatcattaacctttccattaattctacgtcttttagatcttcctaaatcaacacctactctaaatgattcctcaaattaaaccctagttttgcatctgcactttctccgttctagcctgaaaagcctacaatcttttctgtctagtccccatttctgcctcactccagaatctggcttgaagccctggactttctcgaactcgattgctggcaagcaagtcctccatcaaacagatccctcacatgtctgtgcattaaaaatagctaatatgactcactggcacttcttacttactcaaactaaaggacagcatctgtgcttcagggataggagagtgaagagagcagaatgtgaagagggaaactaccaacattcaaaaatcattttctggacttgacattgatgttagctttgtccctggtatttctatcaggaaacatatctgcaagtgattgtatgtagaattattctttcttagctgatctatctggggaggcacattttcaaggatgtctgctatggtgaatatagcattgccatgcttattcatgggtcccactgtttagactaatattataataaaggtcctagtttcaaaaatgccttttgtcaaacttttgtctgcctttgtgtccaaagatgaaccttttaattcattcattccttcaatcaagaaatcattattggctggcgtggtgactcatgcttgtaatcccagcactttgggaggccaagggggaagattgctcaagcgtaggagtttgagaccagcctgggcaacacagggagactctgtctctacaaattgaaaaaaaaaaaaaaaaaaaaaaaaaacttatgctgaggtaggaggatcacttgggcccggaatgtcaaggctacagtaagccatgatcgtgtcactgtactccagcctaggtgacagagcaagatcctatctcaaaaataaaaaaaagaaagtattattgaatgccttctagggctgccatgttctccaacttgtaagggcaccattctcagtatagtctctggagttgagctctagcgggggcattcccttccggggtatattgactgagggacatacaatggtatgtatgacatagtcacctatctatagccctccaggggggattaagaaacatttttccattttcaagtagattactgtatgtttatttgtttgtttgtttgtttgtgtgtttctttgttttgagatggagtctcgctctgtcacccaggctagagtgcagtggcatgatctcggttcactgcaacctccgccttccaggttcaatcaattatcctgcctcagcctcccaagtagctgtgactgcaggcacacgccaccatgtccagctaattttttttgtatttttactagagagggtttcaccatgttggccaggctggtcttgaactcctgactcgagtgatctgctagcctcagcctcccaaagtgctggaattacaaacatgagccaccgcgcccagccagattactgctcatttgttactcattcatacctactggttattcattaaaaatagcccaggtttatgtttttattggccttgtctagtggcttcctccatgtccggagactctctctgtccctgatatgaaagcacacttagtaatcaaacataagcacggtacaggcagagattcgaaaccaactatgaaccaggaaatacaaataatgactttcatataaggtttctgtcttgtaaatgttgataatgcttatcagctaaaggaataaagtccagccctgcacccaacacagctgacaacatgatctttgtaatccacaaaatgtcaagtataattaccctgaccgttccttcacttaaaaaaaaaaaatcaaactggccgggcgcggtggctcacgcctgtagtcccagcactttgggacgtggaggcgggtggatcacgaggtcagaagatcaagaccatcctggctaacacagtgaaaccccgtctctactaaaagtacaaaaaattagccgggcgtggtggcgggtgcctgtagtcccagctactcaggagactgaggcaggagaatggcgtgaacccaggagatggagcttgcagtgagctgagaacacgccactgcattccagcctgggtgacaaagcgagactctgtctcaaaaaaaaaaaaaaaaaaaaatcaaactatgacaagagaaaatttgtgtttctttaacagaacccagccaggaaggtcataaaatctagtcatgacaggttctcctctcagtagaaaaactttttttcctaatagtaactgacctttctcataatttttttcaccccgtcaaacatttcgaagacttaacgcaactacttttgttagttggatggaaaacaccttgtgattcaggtagaaataattcttcaagcagaggaatttatataactgtgccttttactatccattaagcagtttttttatgttggcctacttgtaatgtgtatcaatgtcagtttaaaagaggaaacaacattcagccttttcactggtttataataagaaatcactatttcaaatgaccttccctgaataccactctctactgagtgctggaaggagcgtggacaaagatgagtaagacactgcccacgctctctgtatgcatgcaatctggtgcctgcgatgacatctactcaaagaactcagtcaactggcaagctaacaaggtctatagccatgggtgaaacagactgccttgagaatatgggaagattaattccaactgggggatttgctagggtgtgtagtgaccacgtggggatgtcagaggaatgggaaaacaagaagattaagggatgaaaagagacttgaaacatttaagaatggaagtctggttgaggaattcagacttaaccatgtaagtcctgggactggaaataacaatgctcagacgtgtgtttccttagcaagattttatgtgttcttcatttcatacaatgaacaacataaaatatattatttaaggtctacaaaaatctccaaccctaccttctgttgctgatcctcttggccattttgttcctgcaaaagagcactcctttcccaccaaatgcactttctctctgaccccccggcatgtcttgagttcggtcacctctgtttccctccagctctgctaccagcctgaaatctttgtccagtcttctctagctattcaatttatacactcagcatgctttttttgtttttgttttgtttttttttttttgagacagagtcttgctctgtcacccaggctggagtgcagtggcaaaatcttggctcattgcaaactccacctccggggctcaagcgattctcgtgcctcagcctcccaagtagctgggattataggcgcccaccaccatacccagctaatttttgtatttttagtagagacggggatttcaccatgttggcaaggctggtctcaaactcctgacctcaggtgatccgcccacctcagcctcccaaagtgctgggattacaggcatgagccaccgtgcctggcctcactcagcatgttaattgaaattacacatatatatgtaattaatatataataatataaacatatatatttttagaactgagggcctagtatgtattaagcagtgtgagagatagaaaagtataacagatcagctcactgctaatcagggagtttaccgtctatctaaattctatccatcctttgagagagcttttccagaccagaagcccagcctgtgaaatttgagggtaaaatattccagagtgaggaacagtctgtgctaagccctcgaatgcaaggaacgcagtggaatgcaaggatgcacggggagcatcccagagcccctcttcagaatgagatttggctaagggctttgttgcaagtgctccaatcctatgtccttcactcctcgataaactttctacctgcaagttctcatctcagactccctgagaaactggacataaaatagtaaaatatatagtgatgattttataacatcagcaacaggccgggcgtggtggcttatgcctttaatcccagcactttgggaggccaaagtgggtggatcacgaggtcaggagctcaagaccagcctgaccaacatggtgaaacttcgtctctactaaaaatacaaaaattagccaggcgtggtggcgcacactgtaatcccagctactcaggaggctgaggcaggagagtcgcgttgaacctgggaggcggaggttgcagtgagctgagatcgcgccactgccttccagcctgtgcaacagagcgagactccgtctgaaaaaaaaaaaaaatcagcaacaaaaaaagtaacgataatctaaaacagtaggatatatagcaataaaagaggccgggcgtggtggctcacacctgtaatcccagcattttgggaggccgaggcaggcggattacgaggtcaagtgatcaagatcattctggccaacatggtgaaaccttgtctctactaaaaatacaaaataagctgagcatggtggcacacgaccgtagtcccagctactcaggaggctgaggcaggagaatcacttgaatccggaaggtggaggttgcagtgagccaagattgcaccagtgcactccagcctggcaacagagtgagacaccatctcaaaaacaaacaaacaacaataaaagagagatgaaattttgcctagagaaaaaccttgaactccatgatatggaatttatttatttatttatttgttttattttattttattttttgagacagagtctcactctgtttcctgggctggagtgcagtggcgtgatcttggctcactgcaacctccacatcccaggcccaagtgattctcatgcctcagcctcccgtgtagctgggattacaggcatgcgccaccacatttagctaatttttgtattttagtagagacggggtttcactatgttggccaggctggtctcaaactcctgacctcaggtgatccacccgcctcggcctcccaaagtgctgagattacaggcatgagccactgtgcctagcctggaatttattctttatcctatgaaacagttgtttccaaagtgaagtggctaaaaggatggtaaggggtataggaagaaattatttattaattattcatagttttattaatgtcttttttctgttttgtaatatagataacatattggtaaaaataacacatctaaataatttgaatatatatgtgtgtataataatgtgtgtatatatatatacacacatatacatacacacatatactttggtatgtgctctaattttttcttctttttgttgttgaggcagggcctcactctgttatccaggctggagtgcggtgactcactaaagctgaggctttagtggtaggactaaaccaggaagttgagacttcctgggctcaggcagtcctaccatgtcagcatcccaagtagctgggaccacaggcacaggctaccatgcctggctaatttttaaaatgtttgtagagacagggtctcactgtgttgcccaggctagactcaaactcctaggctcaagcaatcttcctgtcttggcctcttgaagtgctgacatcataccggtgggagccgccgcacctctaattttctttctttttttttttaaccaatagatgtatgcaattaaaatttaagaccatactgtaaacaatgggagagtcattgaggtcttatttgcagaggaggatatactcagcatataaattataataatggataatggttctcaactttcttcctttctttttttttttgttttttgtttgtttgtttgttttgagatggagtcttgctctctgtcacccaggctggagtgcagtggcacaatctcggctcactgcaacctctgcctcccaagttcaagcgattctcctgcctcagcctcccgagtagctgggattacaggcgcccaccactacatccggctaatttttgtatttttagtagagacggggttttaccatcttggccaggctggcctcgaactcctgatcttatgatccacctgtctcggcctcccaaagtgctgggattacaggcatgagccactgcacccggatggttctcaactttcaacccaggagaattccctgggaattattagaaattactgatgaccagaccacaccccaaattaattacatcaactctctggggtaggaacgaacatcaatatttttcttttctcttggtgattctaacgtgccagggttaagaaccactgaattagagttataatcaagtttgatatgaattggccaatgaaatagtataatttaatattaaatgttaattaattaaaactattaaatgttctcaaaagttacagaagaataaaaactaaatatttaagaagttcttttaccttaagtattgaaaataaatggtttttctcttcacgggttgtttttatttccttataaagcctagctgtcatgtgatcctcctgactctgcggaagtaagtcagagaaataaagactaactcactcattaagagaccttttacataaaacactttcttatctgttagaatttgagctttctcagactctcagcttgttttcccaagtttacacaataataaaatacacacagtgaccttcttactcttcttttgccagcggattatttaatactgattagctttgaaatgcaaatagccctatcaaatagcaagctacttgccttcaaccggactaaggctgcattagagtgaaagtcaaaactgttttatgcaaagaaaaaaaatagtctgtcaaaggcccctaggtcttcaattttttcaggattatattcaggatatgaaattctttgtactgactaacggattaccttttcttctaaattcttttgtttccaaactcccaatcctatgttgacttacaattaaccctttgctgaccattagttgaactttcaaaccaaacataacgctttcagcatttgtatttatatcacaacatgacaaatactagtaagagagggaatttttacagaaaaagcttatctagcctcttacatgaggaccactatttgtttttcttaaacagagagtaacaacttcagggctgcaaaatacctttgagattacctaattcaccctcttcattttacagatatgcacccaaggtctggtacgcttttactaggtcagtgtttgggctgaagaaaacagggttgggttgctgaatagtaaattcctggtggaatggaaactgagctgacattggcagatgggtattaaacccgctggagtcctccgcctgaaattcaaggcttgaaagagtcagaggctgacaagataccaaggctgagactgatttactctttctttttctttttctttactttcttttttttttttttttttgagacagggtctcactatgcccccccaggcaatgatcatagctcactgcagcctcaaactcctaggctcaagctatcctcccacctcagccgccccagtagctggggctacaggtgcacaccaccatgccaatttttttgttttgttttgtattagacagggtttctttctgtcacccaggctggagtgtagtggctccatcacagttcgctgcagccttgccctcccgggctcaagtgatcctcccacctcagcctcccaagtagctgagactacagatgtatgccaccatgcccagctaatttttgtattttttgtagagattgtgtttcaccatgttgcccaggatggtctcaaactcctgggctcaaatgatcctcccaccttggcctgccaaagtgtggagattacagatgtgagccaccatggctggcctgcctggctaatttttaaattttctgtagaaacagggtcttgctatgttgcccaggccagtaatgaactcttggcctcaggccatggggattacaggtgtgagcccctgcacttgtccaggactgatttctcaaaagcagcagaagttggtggggttgcagccaggtggcccagcccctgacagcacctaccaagggactggggactgcccagcactggctggtcccaggtgatccggtcaaactgggcattcctctgtaatatccttctgaagaagctgaattaatatctcagtgggatagtttagaaatgacacagacctggggcagaaatacaaagcttgctaccagctatggaagcatcatcctgtttgctttgtcttttttttttttttttttttttgagacggagctggctctgctctcaggctggagtgcagtggcgcgatctcggctcactgcaagctccgcctcccgggttcacgccattctcctgcctcagcctcccgagtagctgggactacaggtgcccaccaccacgcccggctaattttttgtatttttagtagagacggggtttcatcgtgttagctaggatggtctcgatctcctgacctcgtgatctgaccgcctcgcctcccaaagtgctgggattacaggcgtgcagccgcgccacgctgctttgtctttaaaattatctgccattagaaaatcaaacagttgccaggggctgggagaagggaggcacgaggagttattgtttaatgggtgtggaatttcagtttgagaggataaaataagttctgaggatagatggtggtgatggttgcataacaatgtaaatatacttaatgccacttgccactgaactgtagattttaaaatggttaaaatggtatatggtagattttatgtgtgtgtgtgtgtgtgtgtgtgtttctttttagaggtagagttgcattctgtcacccaggctagagtacagtggttcaatcatagctcactgcagcctcaacttcctgggctcaagtgatcctcctatcgcagcctcccaagtagctgggactaaggagtgtaccatcacacctggctgggtttctttgttttagtgtttgtttgtagaaatagggtctcactatgctgccctacctaaattttgttatgtatatattaccacaacaaaaatatatctgctattagttcttttctttttctttctttctttttctttttcttctttcttttttttttctttttttagatagggtcttgctctgttgtccaggctggggtacagtggcatgatcatagctcactgcagcctctaactcctgggctcaagcgaccctcctgcctcagcctcctgagtagctgagaatacaggcacgtgccaccacgtccaggtactttttttgatttttagtagagatggcatttcactttgttgcccaggctgacctcaaactcctgagctcaagtgatcctactgccttggcctcccaaaatgctgggattacaggcgtaagccaccacgctcgacctgctgttagttcttaaatcaccatctctgtgttgttttttttttttttttttttgtcttttttttctttgagttcaagagttttgctcttgttgcccaggctggagtgcaatggcatgatctcagcttactacaacctccgcctctcgggtccaagtcactctcctgcctcagccccccgagtagctgggattacaggcatgagccaccacacctggctaattttgtatttttagtagaggcggggtttctccatgttggtcgggtctcaaactccgacctcaggtgatccgctcacctcggcctcccaaagtgctgggattgcaggcatcagccacctcgcccggcccatctcgtcttttaaataagtatctcaggctcagcacggtggctcacagctgtaatcccagcacctttggaggccgaggcgggcggatcacctgaggttaggagttcgagaccagcctggtcaacatggtgaaaccctgtttctactaaaaatacaaaaattagccaggcttggtggcgggtgcctataattccagctactcaggaggctgaggcaggaaaatcgcttgaatccgggaggcagcggttgcagtgagctgagatcgtgccactgcactccatcctgggcgacagagcaaggaaccatcaaaaaaaaaaaaaaaccctcatattctcatgtagttttttaaataccaaaatattcaagaagtctaggttttgagaaaatcattgccagactgaaaattacctgatagtaaaatctctgagtaaatttagattttaaaaattttgtcagaagcaattggtactcaaagaacacaaagatttgtaaatttcagggaagctaaagttttctaacagcctcaaaaattttatttcccaacactactttccccaaagagaaaagttttgttgttgttgttgttgttgttgtttttgagacagagtctcgttctgtcacccaggctggagtgcagtggcacaatattggctcactgcaacctctgccccaccccaggttcaagcgattctcctgcctcagcctcctgagtagttgggattacaggcatgtgccaccacacctgtctaatttttgtactttcagtagagacggggtttctccatgttggccaggctggtctcgagctcctgacctcaagtgatccgcccaccttggcctcccaaagtgctgggactacaggtgtgagccaccacgcccagccaagaaaagatcttaatacataagtaaaatatagaacagtctccttgtaagtgtttccaacacataaaagaaaggggaggatctttttggaattgttgcggtttgtcatttaatcgtcactttaaagtgaagaagattgagtattagagaagttagtttgtccaaggtttggaagaacagggttttggattagaacctaaaccaatcaaactccaaatcctcactgttaacaattttctgttggcatgcaaatgtatttcttccatcaggctatgtaataattataaataatggggctggtatagacgtaaggtactgacactgaataattccccaaagaaccttgaagtaaactgcttttacatagtgggaaagagtcctcataaagcactcagccctggaacattctttcaaaagcaagacataaaaaaaaatcaaaagtaaaaattctctatcaccgaaaaggaaaagacattttgttgagtgcaaaagaagaatcctgccaagcagagagagtgaactgtagcaaatagacacagatatatctggataattaggcatgatatagtgagtgtttcactgaaacttgaacagctgtagacagaaactgagaattctataaagtttctatatttactcccatatcaggaaattaccaacctggcttgaagctatatggctcagcctgggataaaaactggtgtgagagttccaaaggatcagcaggtgaatcagagccaggacaataaagagaacaagtacagagctgtttatcttatttcagctacaagtttttccaatacctgactgagaaagtgttgagagtcaacacccttgtagtcacgtatggtctatgtgtcttggttttcacatgcatcaggagctgtacatgtgtacatatgcacacttaggaaagccaggccttgggcaaaactatggacaaacacagccacaaatttatataaccccagatctgttccttctatcctctgggaactccggttttcccatagccttccagaattgttctaggagggactagagcctatttttcatgagcaactgggtctagttcttgttattagatatgactcagatcacttccaatctgcaaagcagaagctgtgatgccagtgtttgctgaaaatgctgccactgctattgaacatgcagaggtgtgccgttttggggccaatgtctaatgtagaagaaaacatgtcctttgtccgatctatgaagtcagacggccagggttcaaattccagctttgccattcactaggtatattagcagtgacaaaggtttgtgtatttagcaaatgggattttcatagccctacctcataggatggtggtaatggcagatgatataatgcatataaaatgcctagttaacagtgattgaatgcttattataagctaagcaaagtactaatactgctattatctgtaagaagcaagcagaagatgccactctcagcagtgttccatgcagcaaattgctctgccagtttttactcagtctttaattgcaggccctcgctttaggatctagactgctcctgagtaacatgaatggcagaacctgtgctatgctaaaaaacatcttctggctgggcacggtggctgacacctgtaatcagagcactttgggaggccaaggcgggcagatcacgaggtcaggagttcgagaccagcctgaccaacatggtgaaacgtcatctctactaaaaatacaaaaattagccgggcgtgggggcgcacgcctgtaatcccagctactcaggaggttgaggcaggagaatcgcttgaacctgggaggcggaggttgcagtgagctgagatcgcgccaccgcactccagcgtgggtgacagagcgagactccatctcaaaaaaaaaaaaacaaaaaaaaaacccatcttctgcacaggtccatatgtggcttactcctggggcaaaccgagtgggatgtcaccaatatccaggaggtataataaattgtacctagtttactaattacggaattgcagtacaatagtaatgttttgtatctttttgaatgaccaatttaaaaatatcatataaaaaggtaggaaaaaaccccacaattttcagagacttccaggtgttgttaagaagggccccaaacatgataaacgccactaaaatctgagttgcccactaatatggtttggtgtgtgtcccctccaagtctcatgttgaagtgtgatccccagtgttggagatggggcctggtggcagacattttggtcacaggggtagatccctcaggaatggcttggtgccctccagatggtaatggatgaattcttattctgttagttcatggaaactggttggttaaaggaacatggcacctcctcctctcttgcactctctctctctctcgccatgtgatataccagctccctcttcaccttccaccatgattgtaagcttcctgaggccgttaccagaagcagatgccagcatcttgcttcctgtacagcctgcagaaccatgagccaaaataaacctcttgcctttataaattacccagtctcaggcattcctttatagtaatggaaacagactaatacactcactttcaaaggacacaggtaaagtccctcttacagaatggtgcctcacaaatcacacctaatgtacattaagaattttatgaattcctcctaagcctttgtcctatagatctactttcatgtctgcacacatagatatatgaacaaagataagtgttgtggcagtacagcatatatgcataaatagaaacaaatgtctgcagagaacaggataactaaataatgatacttttaaaaataattgaataaatctctacgttctgatataaaaaattttcaatatcactaagtgaaaaaagcagatgttagaaagtatctctaatatgcccgagttatgtgtgtgtgtgttttaaaatatgtatacacatctgtttatatacctaaaacaattatggaaatatatactatatatatatataattccacatggatataaaacagacaaagtaaaaatcaactacacgtctaatatttaggaattaaaatgatatcccaaacttctccctcctgttagttttacttattttaaacaatatttattacggcaaaataccaatgaaaaaatttgaataatctacaaaaatgtgttgtaagaagaatgtaaaagtaaaaaaggcattagacattaatgataattttctttatctaaacctgtacccaggttgtcttttctgaattcctacttacatctcagaactggaggggctacggagttacttggttaaagtatcatccattacccagccatgttcacaagggcagagggaaaaaaagcatttcttttctaagtgcctcagacttatgagaattgaaagttataaagtgccatttaatattgtttatctatattttccctttagtttaaccaaatcatactgggagatatctagggccctgtattatgtagaatagaagaaagtattttaacaattgttttacactataagatagcttaacaaaaacatgagctgagaaaatctctcagataaaatgatcaaataacataatgattttctgaaaacaaataaaatattgcagtcctaaagaaaaaaaaatgagggccaaaacaatattagtacaaaagttttcaaccgatggtaaataagaagatagtcataatgaaagcataatgaaaaagataaagattaaaggaattccatatgaaaataatctaagtataactgatgttcttgaagaaaactcaacaaatgtaaagaaagttttattcaaagatacagttcaagaaatacccctgaaatgagacaaaaactgaatctgcagaacaaaatatcacctccaggaaaatttgatttagaacattcaactcatagacaagctaatgaggctcaagaatgaagactttttttccaggcatctagattttatagataaactaccaccaaagggagaaaactttggccgaatctccgtggcaatactcaatgccagaaggaaaaaagggcaatggtagccaatctctaaaatgaccttcaacgattcctgcctcctggtgtttatatccttgtgtagtcaccttcctcattttaacagggttggtctgtgtgaccaataggatcccgtggaagtgatggtatgtcacacccaagactacattataaaagacactgtaggccaggcgcggtggctcacgcctgtaaccccagcactttgggaggccgaggcgggcagatcacctgaggtcaggatttcgaggccagcctgaccaacatggagaaaccccatctgtactaaaaaaatacaaaaaattagcagggcgtggtggcacatgtctataatcccagctactcaggaggctgagacaggagaatcacttgaacctgggaggcagaggttgcggtgagccgagatggcaccattgccctccagcctgggcaacaagagtgaaacaaaaaaaaaaaaagagaaagagagacactgtagcctctgtcctggttcacttttctcccctggaccagtcaccctggtgtaagccagctgctctgccaaggtcaacctgataaggaactgaaatctttcacaaacagccaatgaaaaactaacttgcaacaaccaccacatgagtgagccgtcttggaagtggaagttctagttctggtcagcctttgacatgactacggccctagcccacagcttgaatgcagtatcatgagagatcctgagccagaccttgaagctgagctgctcccagatttctgaccctcagaaactatgtatcataataaagatttgttgtgttaagaggctaaaatttccagtaatttgtttcacagcaatagataattaaaacaatcctctaaaagggaaatagcatgtggccccaaaatatcaaacatatacattgtgacccaagaataacatattcagacgagatgttattcaagagtagaagtgtatattttcataaataaaaaatgttaggtgccaggcacagtggctcacgcctacaatcccagcaccttgagaggttgaggcaggtggatcacctgaggtcagtagtttgagaccagcctggccaacatagtgaaaccccgtctctactaaacatataaaaattaactgggagtggtggcaggtgcctgtaatcccagctactcgggaggctgaggcaggagaatcacttgaacccaggaggcagaggttgcagtgagccgagatcacaccatttgcactccagcctgggcaacaagagcaaatctctgtttcagaaaataaaataaaataaaataaaataatgaataggcaatgcaagattcattaaaagaactaggccaggcgcagtggttcctgcctataatcatagcactttgggaggccaaagcaggaggattgcttgagcctgggaagtcaagcctgaaatgagacataattgtgatactgcactccagtctgcagcagactaagacctgtgtcaaaaagaaaaaaaaaaaagaattacttgttagggaagaccagctgattaaaagattcatcaaagcaaagcattcagaaacagaaatcatagtgaaaaaactggcagtgagcattgactcttttaaattggagaaataagttcctatggaaatttattaaaatttccagtttttatcaatagagtagaaagtaaatgttaaaaatcatacaatatacaaataataaaaataatgtcaataaataatgtcaatgacaaagatgagaggaattacaggaatactgaggtcttcaatctttttctagaagaccgttgttaattgataggtaaaccgcaaagattttattaaataaacacactgactccaatgcttctatattttccacaaattcattgttaagataaatcttttaggaaatagtatctcttttggtaaagaactacgctctaattttttttttttttttttgaaacggagtctcgctctgttgcccaggctggagtgcagtggcgcgatcccggctcactgcaagctccgcctaccaggttcacaccattctcctgcttcagcctccccaggagctgggactacaagtgcccgccaccacgcccagctaattttttgtatttttagtagagacggagtttcaccggtttagccaggatggtctcggtctcctgacctcgtgatccacccgcctcggcctcccaaagtgctgggattacaggcatgagccaccgcacccggccattttttttctatttcacctacaattgacttgagaaaatatgctctgattttgaattcacttgtttcttttctattgtaattttttttttttttttttttttttttttttttgctacagagtttcactcttgttgtccaggctggagtgcaatggtgtgatcttggctcaccacaacctcagcctcccaggttcaagcgattctcctgcctcagcctcctgggtagcttggactacaggcgcatgtcaccacggctggctaattttgtgtttttagtacagaaggggtttctccatgttggccaggctggtctcgaactcccgacctcagtcgatctgcctacctcggcctcccaaagtgctgggattataggcgtgagccaccgcacctggccatattgtaaatttaaattataattgtatttagaaatagaatgtatattatgaatccatttgtagagaagttatttatttatttaattaattaattaatttatttatttatttattttgagacagggtctcattctgcagtcaaggctggagtatagtggcacaatcatggctcactgcagccttgaactcctgggctcaagggatcctcttgcctcagcctccctagtagctaggactacagatgagcaccaccacaccaggctaatttttaaattttttgtagcgataaggtcatgctatgtcacccaggctggtctcaaactcctaggctcaagtgatccttccacctcggccttccaaagtgctggaattacaggcatgagccaccttgcctggactcatgtctgctaacagtccatcatatggagtaatttacttaattatttcccccttgctacatagcgaaattttttctaaaatctcatttttatagaaattcagagaacatacttgtacatacatttgtctgcatatccatgtttgttatttcctcagaatagattccaaaatgtagatttactagatcaatgagcatgaatatttttaaagtagtataaaaagcagtttaaaataataatatagttataagtaacatttattgagcacttactctagtaccagatattttactaagaactttacctacattatctcttttaatgatcacgtaaacctaagatgctattgtcattttacaaatgagaaaatctaggctgagaaagtatcatttcctgaagtcacacaattaataaatgtcagaggcagcatcagaagcaaggccagaccctggggcctaatttcatcctcaaaagtgaaagtttcacagtaagattgcttgtgtttgcaccttacctccatttactagctatgaaactctatacaaaatacttagtatctttggctttggttttctctaaactggagaaaataatagtacctttccctagagtaagaattaaatgaaataatgccaggcttggcggctcatgcctgtaatcccagcactttgggagactgaggcaggcagatcacgaggtcaggagttcaagaccagcctggccaacatggtgaaacccgtctctaccaaaaatacaaaaattaattgggtatggtggcacacacctgtaatcccagctactcgggaggctgaggcaggagaatggcatggccccgggaggcggaggttgcagtgagccgagatcgcaccactgcactccagcctgggcgacagagcaagactccatctcaaaaaaaaaaaaaaaaaaaaaaaaaggattaaatgaaataatttaaataaaacagtagtgacaatacgaaagaagaactcgttataaattacctacccaattgctacccttattatttacaactctctgaatataccttgtatattttccataaacccttcccaaattacattcctaccagcagtattgttgacagatttatgtaagtgtggattatagtgggttccaagaatgctaagaaaaataatgcaccaaaaggtgacctatgtataatccacttcctgttgtttgtgtatcatacatgcctcctaaaggtgttatttgaattggcccccctaagcttccttttcattctttgctatagtattcattttagaaagaggaatgtaaataagtgaagtggagaattaaaggagtatttttggtaaatcaagctcttaaaattaattcaatttaaaagttctggttgatgagggcaaagctgatattgtttgaaattaaagagataatttcatcattatcctattttttttcctatgcatacaataaactagaggaagagaaagggagaaaaacagggtaccatcctctgtttgctgtttcaaaaaagacgtttaatttataaatgttattatttatagcaatcaatttttatcatcctcattgatcctcattgcaataaaacacaaatttcattgctgcctttacgattttctgataatttgtgatctatagacagtaaagatattggaattaaaaagtaaaatgtggctgggtgtggtggttaatgcctgtaattctagcactttgggagggcaaggcaggaggattgcttgagcccaggaatttgagaccagcctgggagatatagtgagaccctggctcaaaaaagtaaataagtaaataaataaataataaaacgtaattatattcaaagtgtacaaaatttgatgatgaacatgtacaaagtataccaaatttgattattactttcatcaaaatatggaaattaaagaaacatgaaagatcaaaacatgaacagttttcatatttttttaaatgttattttttgaaaactacaaatgagaattaaggaatatcacaatttcaaatcaaaattattattattattattattcttttgtgagacagagtttccctcttgttgcccaggctggagtgcaatggcacgatctcagctcaccacaacctctgtctcccgggttcaagtgattctcctgcctcagcctcccgagtagctgggattacaggccatgagccacaatgcccagctaattttgtatttttagtagagacggggtttctccatgttggtcaggctggtctggaacacctgacctcaggtgatctgcccacctcggcctcccaaagtgctggggttacaggcgtgagccaccatgcccggcccaaaattatttttaaatgctgaattcttatttcaatttttgaacttaattatattttatattaatatttgaaactaaaatcagcataattctagcattcagtgtccatctagttgcccaaataaagactccttctcccatttcagtatgctcagactatatgaacatttaagagtaagaggaattgttcagtcttatgtagtgctgttccaaacactctgtcattcttgagttccttcagaggtactcctaactgggaacatgaaaacaagacagaaaatggaaggtcctcattacttggaaaatgatgattccattaagcaaggatctctgcattcatactgtctctgagtggaaggatttgaccctttgtgctttctttttacctaggcactcctgggctgagagcctctctgcactccaaggcagtgtatttgtctgacattggcagcagcatatcatgctggcttttggtttcaagaacatcagcaggacatgtggagaatccatcatttccttggggcctcaatgacgttagcctcaggactgatcgtttagggtgacaggtcattctgcgtctgcgtggtcattagaatgacaaagttgtccatgtgttttggttttgttttttgttttttgtttttttgagatgagtctcactctgttgctcaggctagagtgcagtggtgtggtctcagctcactgcaacctccgcttctcaggttcaagggattctcccacctcagccttctcagtagctgggattacagacatgggccaccatgcctggctaatttttgtatttttggtagagatggggtttcaccatgttgaccaggctggtctcaaattcctgacctcaggtgatccacctgcctcagcctcccaaagtgctgggattacaggcatgagccaatgcggctggcctatgtgttctttaatacatttattttgtggctgtttcagtaatatgtggcgcttgccggtatgggattcacagcagtggtcccactggcctgggtctaagagcagaagtgagtattgctccataagtattgtggagaagcaagtattgcttctgtcttcaaagtctttatcctgagaaccaaagtagagactgtcatcattagggttgctggtgcagagccctttaaaaccatagcagatcctcaagcacatgcatcccctgagaggcaagaatcccaagtgagagtagtaaggggccagctcttccagtcacaataatagtaactcaggaagcaggggctgggcacggtggctcacgcctgtaatcccagcactttgggaggctgaggcaggtggatcatgaggtcaggagttgaagaccagcgcgaccaacatggtgaaaccctgtctctactaaaaaatacgaaaattagctgggcatggtggctcatgcctgtaatcccagctacttgggaggctgaggcagaagaattgtttgaacccgggaggtggaggttgcagtgagccgagattgcgccactgcactccagcctggggggcagagccagactccgtctcaaaaataaataaataaataaataaataaataaataaataaataaataaataaaatgaagcagggggcccagggtggctggtgtagtagagactgcagggccaactcctccagctctgcagagctcctcggggctctgatttagaggtcagagccagctctttgctcccacatcttattttgggtacagtgctgcattatttgcatctgggccttgattgggaccaccctggtccagatctacaaatccaccagaaagcaaatcttggggaacaagcttggggagcagggaaagaagtatttatctctcccttcccagaagaccatggtctcctaatgtaaaagttctcaacttctcagctcaggagctggctttaaacaaaatgcctctttttacctttctcctgggcatcactcaagctttctcagtgcaaaaaaaggcataaggatctggtcagggtgattttccatctctacctatacagggaggcagtggcaacatcttttgcagaaaaagagaaaaaaaaaatatcttgtgatccctagtggcagataatcccattaggcaggtgaataaaagcttaatatttatataattggaattcagtggaccctttcaaacagtgctgagatattatcatagtaatttgagtcactaggaatttaatacatttatctagttggtgctctgggggaatatgtatctctattgtttgtcaacggtatttcctttgtctttcattagtggttatgcagttattccttctttctttctttctttcttttctttctttctttctttctttcttttctttctttctttctttcttctttctttctttcttctttctttctttctttttttttgagatggagtcttgctctgttgcccaggatggagtgcagtggtgtgatctcagctcactacggtctctgtgtcctgggttcaagtgattctcctgtctcagcctcctaggtagctgggactacaggcatgtgccaccacacccagctaatttttgtatttttggtagagatggggtttcatcatgttggcgaggctagtctcgaactcctggtctcaggtgatctgcctgcctctgcttcccaaagtgctgggattataggcgtgagacgctgtgcctagcctattagcagttattcttaagtaatctttaaattatatgttgaatgcttctcaagagcctggatttcaccacagagaggcaaatataacatgtacgtctgtaaagattagtataaaatttcttaatctttttagacagagaagataaaaagagtcaccactataatcccagcactttgggaggtcgaggcaggaattccagaccagcctgggcaacatagtgagacaccatctcacccaaaagaacaaaaagaaaaaacaattcatcaggaaaggtgacgcatgcctgtagtctcagctactcaaagggcgaggtgggaggattgctctagctgagatagttgaggctgcagtgagctatgattgcaccactgcactccagcctgggcaacagagtgcaaccctgtctctcaaaaaaaaaaaaaaaaaaaaaaaaaaaaaaatatatatatatatatatttatatatatatggaaaatgttgtttactgcctaggatatgaactttatgcaatcacacaatagaaaattttaaaattatttttattacctaaactattcatttttgctgattacaaaattaacactcattacggaaaacttggaaaatataaaaaagtacaaggagaaaataaaaagcacttatatttcttcatccagatttaaacctgttcgtattctgatgtaaaacctaccagtcttttttcagtatatttgtctatatagataattcatttcaaaaactggaattttagcatgtgtttagttttacagtttgatgtcttcagttaccatattacaattttttttcacttattcaatagtcttctgtgatatcttttttttttttttttctttttgagatggagtttcacttttgttgcccaggctggagtgcaatggcgcaatcttggctcaccacaaactccgcctcccaggttcaagcaattctcctgcctcagcctcccgagtaactagattacaggcatgtgccaccacacacagctaattttgtatttttagtagagacggggtttctccatgttggttaggctggtctggaactcccaacctcaggtgatccgcccgcctcagcctcccaaaatgctgggattacaggcgtgagcgaccacgcccggcgatgtcttttttttaagaggcaaagtctgattatgttgccccgcctggagtgcagtggctagtcccaggtgcaaccatagtgcatacagcttcagacttctgtgttcaagtgaccctcctaccttagcctcctgagtagctgggactacagttgtgcaccactgcacttggccatggtatcttttttgtttgttagtttgtttttgtttttttttgttttgttttgttttttgagtcggagtctcccttagtcgcccaggctggagtgcagtggcgcgatctcggctcactgcaagctccgcctcccgggttcacgccattctcctgcctcagcctcccaagtagctgggattacaggcacccaccaccacgcccggctaattttttgtgcttttggtagagacggggtttcaccgttttagctaggatggtctcgatctcctgacctcgtgatccgcccgcctcggcctcccaaagtgctgggattacaggcgtgagccaccgcgcccggctgccatggtatcttttaatgtctaaagaggatcataccattacagttatataccctgtttatctttagaaaaaaatgtttcctaatttttttttttttaccaaccaatcaagcagcagtgaatctatttaaacaaactcctatttttagaaattttaagttattccttgtgttttactattatttacttgaagcacatttctagaactagaatgtttgggtaaaagtgcctatacgggtcgcaagcccctggtaaccacagcaaaccacatacagccacctccttcccactcctcaccgtcaccccacatgcacgctaagcaactagtttatgctcccaccagaaatgcatataaaaaggctgtccctgcaccttcctttatagggcagtatatggttttttttcagtatggacaatttatttaattactagagaaaggtttttattttctttttttctctttttttttttttttttttttttagagacggagtcttgctctgtcgcccaggctagagtgcagtggcgcgatctcggctcaccgcaagctccgcctcccgggttcacgccattctcctgcctcagcctcccgggtagctgggactacaggtgcccaccaccacgcccggctaattttttgtattttttagtggagacggggtttcaccgtgttagccaggatggtctcgatctcctgacctcgtgatctgcctccctcggcctcccaaagtgctgggattacaagcgtgagccactgtgcccagccaggtttttattttcatacatttaattgcctcttgtatactttaccatttttctgcttgttttgttttgttttttgagacggagtctctctctgtcactcaggctggagtacagtggcatgatctgggctcactgcaaccaacctctgcctcccaggttcaagtgattctcctgtctcagcctcccgagtagctgggattacaggtgcccaccaccacgcccagctaatttttgtatttttagtagagatagggtttcaggccgaacacggtggctcacgcctgtaatcccaccactatgggaggccgaggcaggtgggtcacttgaggtcaggagttcgagaccagcctgacccacacagtgaaaccccgtctctactaacgatacaaaattagccaggcatggtagtgcatgcctgtaatcccagctacttggagacagaagaatcgcttgaacccaggaagcggaggttgcagtgagctgagatcgggccattgcactccagcctgggcaacaagagcgaaactccatctcaaaaaaaaaaaaaaaaaataggccaggcgcggtggctcatgcctgtaagtaatcccagcactttgggaggccaaggcgggtggatcgcctgaggtcaggagttcaagaccagcctggccaacatggtgaaaccccatctctactacaaaaatacaaaaattagccgggcacagtggcgggcgcctgtaatcccagctagtcaggaggctgaggcaggagaatcacttgaacccaggaggcgtaggttgcggtgagctgagattgtgcccctgtactccagcctgggcgacacagtgactccatctcaacaacagcaacaacaaaaaagagacagtgtttcaccatgttggccaggctggtctggaactcctgacctcaggtgatctgccagcctcggcctcccaaagtgctggaattacacgcgtgagccaccatgccgggtccccattttttagctgtaatattcaagtttcttaatgagctttttactttgaaaaaataaagattaaggtaattatcctatgtcatgtatttgcaaatatttttctagtttgtcatttttcctttgtaattgtgtttgacattttttgacatacagatgttttaaattgtctatgctgttaaacttatcaatcatttcctttatgttttcttccttttgttttattacacaggaaatttcacttgctgaaaatttatccacacttatgatttgtgtacatttccacaagtatgttatatttcagtaaggtttaccaaaaataataaaggttttttctgcatagtgtgtgtgtgtgtgtgtgtgtgtgtgtgtgtgtgtgtgtgtaaccatttgtcctttttttctgacctaggcattcctgccctgtagagtcctcccctgtacttggaagcaacatatttttctgacattggcagcagcatacactcaaaccttcacatttggtcatataaatatgatcaaatgtcaaatacacacacacatacacacacacatattcttctagttattctattacttcattttttaagttctttaagccatttggttatgttgtaacgtgaaccaactaaatttatttttccaaattgtcaactaattttagcagaatcatttgtctttgaatagggataaattagtagctctttttacccccttaattttagcattatttgcaaaacaaatgagaaaggttggtcttttggctcttctgtgttcttaacttctatgacttagaatcatatatgttagaaaatcaccgatggtgatttaaaaccataaagaggagaaaacactgatgtaaatatactaatcaagcattttacctaactagtccagaaagacttgaataaccgacctaccaatggtaattgttttcatactagtaaagcccaagatattaaaaaagataaaaacggagatagagaagctgtttcttccagatttctaagataaacagtctagggaagaaattatcagaagcaaatctagccacattggcggcagaacagttccttattttgcggatgggttccttctcctgcctctggtgatgggataactctttggccccatggttcctgtgcatccatatatccttccattggctactaatactgacttggaagctcttcagactctggggttgagcataggagcaaacaggaggtaatgctactcaccatcactgagtcactgttatttctactgcttctccatgtctcctaattggaggagcatacattgccatcatcttgcctagcattctgtgacctgttaccatcctcctgagcacctactgcctcctggagtagtagctaaggatcctgcaaatttatggaggcacttatgcttcctcataactatgagaaccacctcctaaatagtaaccggaggcacttggttaactctttggtcctcagaaaataggtgttcctaaaaatctgtgtactcccaggaattttggataccaatgtatgaacagtccttaacattgttgataaaacaacccatatttattgttatgggcataggtcagtaatgaattctactttgcatttactgttggggacagactgccagtatcaaccaacactactttctgtctctttaatctcagcacatttgtcaaaactccagcatatctgagtctgtacctctgctgggtttcattttgaataaaggaagtcagaagtgaaaaaatgaaaaccaccttctatgtcaatactgatcattcaaatgtagccatgctatctaactgtattacacactagggatcttataatgaatttcattttctactaaattgattaaattaaggcctgttgatttactccaggagaacaaaaaacttgtttgttccctaatatctataatagtgtccatcacatatttggtgtgaaaaataaattatataaaaagttatttattttttaaataggcaatgcatgcatatacaaattcaaaagatagaaaaggatatatagtgaaaatttaatttttgtttcctcatctcccagccaacaactctcttcctcagaagcaatcactgttatcagtttttttctatctttcagaaaaaatcatatgcattttaacatacacacacacaaacatatttcacagaaattgtgttatatgataaagttttgtaacttacttttttcccatttaacagatgttcttgatgtattatttcacaaagagaaaaatattaacatttcataaaaagctgcctcaatgaaggacattttgtattttttgcctagtcaatatgaaaacttagtcattgataaaactatttctaccttctaatgagaattttaaaaactataaacatgattttttaaaaaaaaattgagtttccaaaaagaaaggaaagaagattaatccagaaactccacatcttcctggattggagggtaccctatcgttcaaaaattcttccagagtatcatatgtttcagatggattcaagcagaatattttttcaaagatcagtaagcggtgcacttagaagagaaacagcctctctacatctaagactgtgagtattaaaagccacatgtagaaagcacctgcctaacatagagccaaaccaaatacaagcagagccaaaggaactgagtcatgatgtgatcatttgaacttctggattcagctaggcctgaagcagggccaggactagggtgaagtaagcgaggcattaatttgaggggcaaattttaaagggatgcaaagaaacctcagtaataaaagaaaatacagtattttcttttttataataaaaatattttaattctttatttcaataaaatatattattccctcctatttgtcagaacatgaacatagaaaatatttccaataatacttttaagaatcaaaattaatgcccaaaaaatccacaaggaaaaaaacaccattatttgtttatttatttcatttatttatttttttttagacagagtcttgcctctctgtcacccaggctggagtgcagtggcgcaatctcggctcactgtaacctctgcctcctgggttccagtaattctcctgcctcagaatccagagtagctggattacaggcatgcaccaccatgcctggctaatttttttgtatttttagtagagatggggttttgccctgttgaccaggctggtctcgaactcctgagctcaggtgatctgactgcctcggcctcccaaagtgctgagattacaggcatgaaccaccacgcctggcccaaaagtactaattaaaaaatatatattattattattaagttccggggtacatgtgcaggtttgttacataggtaaatgtgttccacggtggtttgctgcacctaacaacccaccacctaggtattaagcccaggatgcattagctcttttccctaatgttctcccccaaaactcaccctcccttgacacgccccagtgtgtgtagttcccctccctgtatccatgtgttctcattgttcagctcccactcacaagtgagaacatgcagtgtttggttttctgttcctgtgttaatttgctgaggaggaggcttccagcttcacccacatccctgcaaaggacatgatctcgttcctttttatggctgcatagtattccatgatgcatatgtaccacattttctttatccaatctatcattgatggacatttgggttggttccaagtctttgctattgtgaatagtgctgcaatgaatatatgcatgcatgtatctttataattgaatgatttgtattcctttgggtatatacccagtaatgggattgctgggtcaaatactaattttttttttttttttttgagatggagtctcgcattgtggcctaggctggagtgtcatgtgcgatattggctcactgcaacctccacctcctgggttcaagcaattctcctgcctcagactcctgagtagctgagattacaggtgcccaccaccacgtcgggctaattttttatatttttagtactgatggggtttcactatgttggccaggatggtctcgaactcctgaccttgtgatccgtccacctcagcctcccaaagtgctgggattacaggcatgagccaccatgcctggctaatttttaaatgaaaacaggatcttagtctgcacttacatgagtttaccttacttggcctccctctaatcccagctctgagacattctggttattacatgagcagataatttctatacattttatttttacttaagttaattttagctgaatttctgtcatttgaaattgagaaaaccctgcgtaaaggatcaattcccaatgctactgtaagcattacatgatttcatacatgtgtagttcttaggaaaggcttggtgcatgtataaatgcagattattatggctattgttactgcaatttcatttcaccgcctctaccatcctaaaatactccaaactcctacaaaaatttattgcagatatgcaaaattgtaaaagcagccctgtttgcgcagatcccgtgggacaaccccatgtgttgtgctgtgtatcccctatgcgtgggtactgaggttaagcttccaatgggctgctcctggccagggaccaagtgtggcagggaaacaaaggcagacccatttttcacctggtgattctggcttgaggattccgcatcaacctggacaaaactttcttagaactgcactgcagtctaagacatcctactcattcttccttcctgccctctctccatcccagggatgagatcagcattgcatctgaagctctctcaaccctccttttttctgctcaattttccttcacaagtgttttctccaagaaatttctcacacttcaaatcctgtcttgacatcagtttctagaaagaccagaactaacatttgttgataatctctctttctattccggtgtgtacatttctttctaaataactcagaactatcaaacttggtacacacacacaagcacacacgctcatgttcctaaccaaaggctaaaactcctcggccatcaggtcggccttagggacttggtggtggtacttaggggaagtcaggctgtggttaaaacagacttaccaggaaccacaagcactggcagattatcaagaagctgaatcacggaccgttacaagaagctgaatcatggatagttattcctcctgattcttgtgtgggtgtttttttttgttttgttttgtttttgttttttactgtaatttaatcagtcaagaaatagaaaaaaattcaagtattttctagcttaattttctgaaatacctagatgcctcgaaccctcaaattagaacttctagtacataagccatagctccgatctcccactgctcacctctggtgacgcaggcaccacatgggaacaacgtaggccaaacactttgccaccacttattttcctttaagggagtgaggaattctccttcaagagagtgagaaattctccttcacttactaaccactaattggtctctgacaggattagcaggtcctcttgagaaacaaaaacacagaattcttgtatcttcaaaggttgttttatgatatctcccttaaccagcacctgatttaaaaaaggttttatctatgcagttgaaccagactcctgcctgtctagcccatgagggtataccagaacccagggacctagtaccataatccccaccagtgggtcattaggtgttaagatacagccaagccacaaacaatgtccagtgattcccaagccaccacacagagaacatctgcatgctgcaacaggcaaggcgtacgccagcccagaaatcttaccagtaaaccaaaaagcctcctgctttacctgggcaggtacagtggactgtatttactggttttatgatgctgcctttgttccaaggtcatgatgacatcatagcacttgcaggtattgtttcccaataatggttcattttactaggtactgggaatcttcctcccatggccatccatactactatgctacaaactgataactgttattgcttctagagaaagtctaggtgactgacagtcaggcataagaaaagattttttccttttttttttttttttaaagtagagacagggttttgccatgtttccctgactggtctggaactcctgacctcaagtgatccacctgccttggcctcccaaagtgctgggattacagacgtcagccactgtgctcggctacaattgtttacttttaaatcctctactgaagttggagccacataattgcatcacctactcaaaaaagaaataaactaaaataacatagaagttgtgctattcccacagaaattttagatggccttaccagtatcagagcagggttcacaatttacacaatgatgaaagatactattcttcagtctctagggctttctccggcataaaacttttccagtgatattttagttttctaccacctgccacgtgaacacctgggtctctctccttcacacctctgaggcctgctaaaaacgtcatccattcttccatcaaaaacagtgtttcaatgtaaacatggagtctatcatttggatctcatgataccttctgtccagggttgataattcctggctggccccaaacaccctgtactcaccttctgtattagcctgtttttgcattgctataaagaaatacctgaggctgggtaatttataaagaaagctggtttattctggcttatggctctgcaggctattcaggaagcatgatgccagcatctatttcaggtgagggtcccaggaagcttacagttatggccaaaggtgaaggcagaggtggcacatcacatggtgagagagggagaaagagagagaggaggaaccaggctcctttaaacaaccagctctcgcttgaactgagtgagaactcacttattaccaagggaagggcattaatccattcatgagggatcttccccaacgatccaatcacctcccactaggccccaccttcaacacgggcgattacatctcaacatgaacatgagatttggaggagacagacatccaaaccatatcaacttctaatatgctaagacaaagtacaatttttccatagatcagcataaatcctcaaagacacagactctttgccacttcaggtggaaatcccagtaaattgaatacaaagtcatgtacacatatgcatttataggctgggtgcagtggctcatggctgtaatcctagcactttgtggggctgaggtgggcagatcacttgggcccaggagtttgagaccagcctaggaaacagggcaaaacctaatttctacaaaaaatacaaaaattagttgggtgtggaggcacatgcctatagtcccggctactcaggaggctgaagtgggaggatcgcctgagaccgggaggtcaaggctgcagtgagccaaaatcatgccactgcactccagcccggggaacagagtgagactctgtctcaagagaacaaaacaagacaacaacaatagcaacaacaacatatatgcacttatttttcttagtgagaagattctttatcattttttcccaatcaatgactgcctaaggatctttagctttaatcaaattctccaagtgattgatagccaccaaaaaaatttaaccatatagcagatgccatgtagcagtgcctggtccataaccattctgcattcactgttcccatttttcctacgggcaagcaccaatgactgactgcctgaggactttctttagctgcaggagtgtgctagacccctaagagacagatggtgaaaatttgggagttcatacctccaggaaaagccttcaaccattgacagatgaaagttggtgaataaacaccccagctcctcacccctccgatgggacaactccaagacctactctatataatctttcaggatctcccattaggattgacccaatatccacaaggtcaacctgccaccaacataccctctcttggcttttttccatggttgttttacttccctatttccctactcgtgcttgagatcaccttctactctgcacccaaatctgtaccttagggtcagcttctggggaaaagttctcagcccaagttaaatgactatcctattggttctcttacagattatccattctggctatcaactggttcatctgtacttcaatcaatactaaattcacaatgtctgctgagtcagaccagttttatatccatctttggaaatctacctgtatttcactgatcccttctttaatggtaaatcagaccctactttgtatttaaactcactatactgtacaccaaactagaggtagcttataaagaaaatacattactcttcctaacattttaggtttttgtgcccagcataccttcttaaaaaaaatttctggagctctttgaggccttggggaaaaaataaaatgaatgaaaaaggagctgacctgcgatatcatggaggctaaatatttcactaattctgttttgttgaagattacagtctgatttggtttatttgttttttgttttggtttgagagctttccttctttctccctttatttggcactcatccttcttaagagactatttgagttttagtagctggactctgggaaccgcaggcatgttgtttggcagatggatttttgcagttctacagaccaaacctaattatccattttgagttgtcatctgagtttctgtttgagttgccaatgtttgtccattggatttttctcctgtccattaagcaattttctcgcatgatagagcatctacacaaaaagaatttcaggaaaccagcagccatgtgttgagacccataggggagctgctgagattattcacacaaagtccatttctctccttaagcaaggaagcaggaaatatataatactagaataaggaactcagaaaagatgtggcctaacacatctacaagacacagtctggaaaattcctatcatgttaacagtccaacatatgcgctgaatgcatttctacttggtcaagccagagaatatttaatctccatctgaataacataaaaatgaaaatgctataaattgcaactacctaaatattttttgaatcaatacatatcaaatatgtttaagtgttcttttctcatttttcttaagtttctacaaaggatcaactgtcacccgcacccagcatctcctgccatatctgaagtttgggtgactcactgacccaacagaaatcagtctccctttagtgataccccctatattcctttctttttttcattgcttagcaatagcactgccagggaaatggaaacaaacaaaaaaggagaaaatcaacccccgtttatttttatgtacaataaagttttcatgaaagtgaaatcataatgcctaatggtgacaagaatgctttttagtaatgagagactttgtaaacctttcaagtgctttaaaaaacgatatataatatttgtacctattttgggggtacttgtgatattttgatacatgtatactatgtgaaatcaaattagggtaattgggggtatccatcacctcaaatatatatcttctctttgtgtggggaacataataattcttctagctattttgaaatgtacaataaattatggttaactataatttccctattctactattggatactacaacttattccatctaactgtacctgtcaagtgtttttgaataagaaacatttaactgacttttttttaaagagatggggtcttgctgtgttgcgcgggatgaatttgaactgaactccctagtagctgggactaaaggcacatacttttgagtttggcttaactgactttgaaagctataaaagtagggataggtaagatcagctgaacaacatgtccatttgcataatagcagagttcctcctttatcagaaatgtgcaagtttccttgtcctttagagtttgagttgtgagttgagataatatgtttttgctaccagcaatcgtaaattaaatcaacatacctacaaatggctgtcctaacagggagtcatctagtatccaaagaaccaccattccctgcccactcctattgctcctggatacccacgccacttcaccttccttctcttcttcattactgattagtagaatgtgtggctgctatcttcccaaactcaataataaggtcaccaaagctgccagggatctgtggttcccaggcatcctattcttgctgaattaccactcctgctactcactccttcaaccctaatcagggtccttcactccaactttccactccattactatcagcctctgcctaagctagatacttatcctttcctgaaacatctgccaattctctctctcactttgtaacatgaaaatgtaaccctgtctccctaaaactacaagcagtattagttcaacaccaaagaatctgcactttgcccttaaaccatctatgctcctttgttaggaaggagaataaggtttgactcctaattctgtgtctgagcaagaaaaggtgctttttttttatttcatattttcttttatttattattattatactttaagttttagggtacatgtgcacaatgtccaggttagttacatatgtatacatgtgccatgctggtgcgctgcacccactaactcatcatcttgcattacgtatatctcccaatgccatccctccccactccccccaccgcacaacagtccccagagtgtgatgttccccttcctgtgtccatgtgttctcattgttcaattcccacctatgagtgagaatatgtggtgtttggttttttgttcttgtgatagtttgctgagaatgatgatttccaatttcatccatgtccctacaaaggacatgaactcatcattttttatggctgcatagtattccatggtttatatgtgccacattttcttaatccagtctatcattgttggacatttgggttggttccaagtctttgctattgtgaataatgccgcaataaacatacgtgtgcatgtgtctttatagcagcatgatttataatcctttgggtatatacctggtaatgggatggctgggtcaaatggtatttctagttctagatccctgaggaatcgccacactgacttccacaatggttgaactagtttacagtcccaccaacagtgtaaaagtgttcctgtttctccacatcctctccagcacctgttgtttcctgattttttaatgattgccattctaactggtgtgagatggtatctcattgtggttttgatttgcatttctctgatggccagtgatggtgagcattttttcatgaaagatgctttactggagtactgacttggcctggtgaatacaagtcctcctagaaacattcttataaatatttcaccacgctctgtcaagaacactgtaggctaaatgggtgtttggaggcttccttggtaaattaactacattcatttacagcatagctgctatgagaagatgcatttagttttacttccaatatgaaaaacaaacaaattcctcaaaggagtacaatctaggttccaaaatctagatctccagccaggtcggctctctttctggcatcttcacttggatgtccctcgggcattgaaaacctaacatttgtattccactaaacctgcttgtccactaaccctattcaattagcagcacctttttacattgattgccaaatctagaaacctgaaacagctttgtttcttgttcctcactgcctatatccagctgggctcaaattttgctagtcatccctccaaaaatctcctaagcctctcagattgctgtaacaacttgagttcagaccccaccagtttttactgtgactttaaaaacaatttcttcaataatttcccttttgttttttctgccctcttcagatccatccttggcactgcctctagagttttctttccaaaacacagacaggattatgataggcccctgtttaaaaggaaagaaaaaaaaaagcaaacttagattgttctctctgctaaatcaaaaagcctgacttcagaagaagagggattcttgcccattctgtcaaatttgagcacctgggcagtacaacaaggattttgctggcagcaattctccaggagtctcagatgtgagcccctcaataaggccagagaatagacagctctaatgcattcagtcttctctctcttcaggtgccctagaaaaatcttcagtgaggaccccctcacccagagcaaaaaagatgcatggagaggagtctgcctcttggattcaagtgggaacagttgctacagaaataatcccctggctttcctgtctaatctcagatttctaataaccagagttaaattttgtattaattgtggtagatccccttaatcccagtttttctgagctctccccctttcactaccttcctaatttgtctcttatcttactcaagttttaatgactatattttaagttgttaaggcattctataaattttctgttcaagcagattttagaataattagaatgccaatcattttctccctaattataatcccaagttgaagttgcagaatttgggtgcaaattttgaaagaacactcaactgggcgcagtggctcacacctgtaatcccactactttgagaggccgaggctggcggatcacgaggtcaggagttcaagaccagcctggccaatatggtgaaaccctgtttctactaaaaatacaaaaattagctggatgtggtggggagcgcctgtggtcccagctaaggcaggagaatcacttgaacccgggaggtgaaggttgcagtcagctgggatcatgccactgcactccagcctgggcaacagagcgagactccatctcaaaaaaaaaaaaagaaagaacactgttggttgggcatggtggctcatgcttgtaatctcaacactgtgggaggccaaagtgggaggaggatcacttgaggccagtagttcaagaccagcctgggaaacaaagccagtacctatctctctctctctctttgttcttttaaagaaagaacactctttctaaaatctaaatgcattcagtcaacaaatacgtttgagcctatatttagtactaaactagatgctggagctacaacagtaaggaaaaaccgacatgcaccctgccctcacagagcctacagttgggtgagtgggataggcatgaatcaaacaatcaaacaaataacacattcaagtttgacactgcaattgtagaaagtgctctgaaggggaggtgaccggtgctttgagaaatataatgcaaattattattatttttattttttcaaatgaaaggtctcacatatttattactgaacccagccaaccagcgcattcacaatagattcagagaggaaaaaaatatattcccaataaaacatgaccaactgtccagatagtggtgacattttcagcttgatatggtaacatggtcatgaccttgagacagcataaatacgtgtgccatctcgtatgcagttccttgcagacccagcttggttcttctccaatatctcctcttggagttgtacccgattttatttccagttttcatccgaatctactgtggaatgggataattttgcttttgtttcattgccaggaattaatcctgaaagcgtgagaaaacatggcgaaaagtggagtcaagcacacaccacaatggcaaagaaaggaagagacagctgtaatacaaattaaatcaaatgtaatcagaggggtcccttaggaaaggatacttgttctgaaatagtaaggatgactaggagatacccgcttgagaaggtcaagtattccaggcaaagggaacagcatctgcaaaggaaacagccacagcagggacggggacattgagatgaacttagagaggcaggtaaatgcaaactcttcagttaagtattatctttatcataaatgcaactgaagtccttgaatcaatcccttcatgaggaggaaatgagggtgccactggtttcattctaatcaaaggaagggggacttattctgaattccatctctgattcccaaaatatctggctagtgctttaatgtttccatgactctagtttccttacttataacaagtttacctcaatgcttgtcacctccagttttataaaggtattttaaggaacaatgagtcataattgctgagttctttgaactccttggatgaaagatgttatactgcctataaacataaagcattgttattatctatcagaaaaaaagctgtccccagccaaaaagaaaccagcaaaatacaaagtatatgaggcgccacacacttctgtaatatttaaatttataatctgggtataaattaaatgggtttgacattgagttaagcccagcatctttgatctatactgcccacagcactatgcaaacattgagttaagcccagcatctttgatctataatgcccacagcgctatgcaaacattgagtcatctaatctgaaaatgctctgggggtgtgtatgtcacaaacaccagacattatcattctttctttgaatttttttcctaaagcacaccaccaaagctagtgtaaaatctcagaaaatgaacacaaattagtcgttattctgctagtcttctttcttttcattcaaacgcccaatcaaaagcatctctacaccaaaatacaaacatgatcacaaagataaggaaaagcttaaataaaacaagcaaaagatttttattcctgggtaaacatcttatctttttcttatttttagtacagggcaggtttgctactttgtgaactgttttggcctaagaaggaaagtagagaaaaaggactagagatgaggatactataagaatgggaactttggcaaaagaagtgaaatggaaacagggatgagacgaaaatttatataggttcattccttttcttttttttttttttttttgagaggagtctcgctctgtcgcccaggctggagtgcagtggtgcgatcttggctcactgcaacttccgcctcccgggttcaagcgattctcctgtctcagcctcctgagtaactgggattacaggtgcatgccaccatgcccagctaatttttgtaattttagtacagacggggtttcaccatgttggccgggctggtctcaaactcctaacctcaggtgatccactcacctgagcctcccaaagtgctggagttacaggagtgagccaccacacccagtagttcactcttttctttcctttcactaatatagcttacagtagagatggagggagggtgagacacttaaaacccagggccaacttatccagggcctgtgaaaatgttttaatttcttttaaaatcagaagaaataatgatatgatccagcctgaattaaatttgtctttataccaacactgttgtaaaaacaattattattatttttaatggtggcaggggttcacaaagatgaaagtacttaaggcccctgaaagtcacaatgtggccctggaaatgcccttagatattttgaggaaaacttgctgaggacatccttgactatttatttattctacctggacactagagaattccacaaaagcaattgaatacaatatttgagaagtaattcaataaactgaatggaggaagctaagtaaaaacagaacctgggccgggcgtggtggctcacgcctgtaatcccagcactttgggaggctgaggtgggtggattgcctgagctcaggagttccagaccagcctggccaatatggtgaaaccccatctctactaaaatacaaaatatcagctgggcatggcagcaggcctgtaagcccagctacttgagaggctgaggcatgagaattgcttgaacctaggaggcggaggttgcagtgagctgagatcatgccattgcactccagcctgggtgacaaagtgaaactctgtctcaaataaacaaacaaacaaacaaaccctgggggattatcagtaaaggaaactgtggtttaacttctccatacagcttatgtacacggcatggggtatattcccctatttacaaggctattgaagagagtcatgaacctcatctaagaattggtaattataggccaggtgcggtggctcatgcatgtaatccagcactttgggaggccgaggtgggtggaccatctgaggtcaggagttcaagaccagcctggccaacatggtgagacctcatctcgattaaaaatacaaaaaatcccagctactcaggaggctgaggtgagagaattgcttgaacctgggagacagaggttgcaatgagccaagatagtgccactgcactccagcctgggcaacagagcgagactctgtctcaaaaaaaaaagggggtctcttctcttggctttggagcccccgcatctgtctctgtacaaggtagcttcttccttttttcttctcccttctttcttgccgattaaactctccactccttaataccaaaaaaaaaagaattggtaactacaagcccttcctcatgctagtgtctgatcagaatttacattaacaatataatctataacgtagcaccaagagggtattttaaacattttcctggaataggagtgtccctaggatcctgtcagaagctaatacaaatcccctctcaagaaaaacacttaaggcggggcgcagtgactcacgccagtaatcccagaactttgggaggccggggcaggtggatcacctgaggtcaggagtttgagaccagcctggcaacatggtgacaccccagctctactaaaactacaaaactagcttggcgtggtggcacaagcctgtaatcccagctactcgagaggctgaggcaggagaatcgcttgaacctgggaggcagaggttgcagtgagccaagattgcgccattgcaatccatcatgggcaacaagagcgaaactccgtctcaaaaaaaaaaaaaaaaaaacacttaaaaccctcaaacaattcacacagataaagctccataaacatgagtttataacaaaaaatcatcataaaacacatgaaataagcctaacataagcaaaaatgtacaaaaacagcagacaataaaatgagagctgggcacagtggcacacacttgtggtctcacctacctgggaggctgaggagggaggactgcttgagtccaggagttttttgagactgaattttgctcttgttgcccaggctggagtacaatggcacattcttggctcactacaacttccacctcttgggttcaagtgattctcctgcctcagtctcccgagtagctgggtttacaggcatgcaccaccacacctggctaattttgtatatttagtagagacagggtttctccatgttggccaggctagtctcaagctcctgagctcaggtgatccacctgcctcagcctcccaaagtgctgggattacaggcatgaatactgtgcctggccaagtccaggagtttgagtctagcctgggtaacatagagagaccttgtctccaaaaattaattaattaattaattaaagaaaaaaaaaaccagccaggcatggtggctcacgcctgttaatcccagcactttgggaggctgaggcaagtggatcacttgaggttaggagtttgagaccagcctggccaacatggtgaaactccatttctacaaaaaatacaaaaattagccaggcatggtggtgtgcacctgtagtctcagatactcgggaggctgaggcaggagaattgcttgaacccagaaggtggacgttgcagtgagcggagattgcaccactgcactccaggttgggcaacagagtgagactccatctcaaaaaaaaaaaaaaggaaaaggaaaaagaaaacaaaccaaaatgagacacataatgatttcagatcatgcaattattgcacacataatatataagtatatttaacatgtttaaagaaatgataactggaagtatgagtaggaataagcaaccaagcagatatatatttttaaagcttaaatattatgaataaaaatacacaacttaaataaaaactcttaaggataattgaaagtagattcaacacaactgaagagcaaagttgttaataggtagataaaactgaaaaaaatcacccagaattcagctcagaatatcaaatacatggaaaatatgagacaataagatataaaggataggatgagaaggtataacacttatctaagtggcaccccagaggatgacaatagagagatatgggaaaagcaacattgaataagaatttaaatattgagatttttccagaattgagggataacacagataggtatttttaaacaaataaaaacaaagtttgctttaaaaagaccctcttaggccaggcactgtggctcccacctgtaatcccagcaccttgggaggccgaggcaggtggatcacctgaggtcaggagttcgagaccagcctggctaatatggtgaaatcacgtctctactaaaaacataaaaattagccgggcatggtggccacctgtaatcccagctacctgggaggctgagactgaagaatcgcttgaacctggaagggggaggttgcagtgagccaagaccacagcattgcactccagcctgggcaacaagagtgaaattctgtctggaaaaaaaaaaaaaaagtcctcttggtgtaatcaagttgccaaaacaaaaaataaaaaagatactcagtaatttgtaaaggacatacttctggaagaaggaattatcccagaagtggtttgatatgcaagaagaaatggtgaacaaagacatgcagacaaatctaaaggaacattgactctattgaggactaaactctgattttttttttttatctttcccaaattcttatctaaggggtctggggagtcatggcctagaaatcataaattctcatcagatgggttttatttaaccctatatatagtgacttactttccaacctgactctggcataacattcagagacaaggaagaaaatcaaaatattttaccccaaaacatgtttctttgccgtatcttgaaagctgtcctttgtgggggaaaatttgcatctgtaaggaatttctattaacatagctagttcttcttcctctaggacctcccaatcctaaagagattaactggctgggagcggtggctcacacctttaatctcagcactttgggaggcccagaccgcggatcacaaggtcaagagactgagaccatcctggccaacgtggtgaaaccccgtctctactaatagtaaaatccaaaaaaattagccgggcgtggtggcgggcgcctgtaatcccagctacaggggaggctgagtcaggagaatcgcttgaaccctggaggtgaagcttgcagtgagccgagatcgcgccactgcactccagcgtgagtgacagagcgagactctatctcaaaaaaaaaaagaaaagaaaaagaaaatttgagacggagtctggctctgtcgcccaggctggagtgcagtggcgcgatcccggctcactgcaagctctgcctcccgggttcacgccattctcctgcctcagcctcccgagtagctgggactacaggcgcccgccactacgcctggctaatttttgcatttttagtacagacggggtttcattatgttggccaggctggtctcaaacgcctgacctcaggtgatccgcccgcctcggcctcccaaagtgctgggattacaggcgtgagccaccgaacccggcctaaatctagcaccttttaaagatctggataggaagcatttgttatctattgtctctaagggcacccactataagacttcaaaagaaccttggtctccacaatctcttatcttaacctgaacatttcctttctgtgatctcgcgtctttagataaactcaaccaattgtcaaccaggaaatgtttaaattttcctagagcctggaaccccgcccgactttgagttgccccgcctttctgtaccaaattaatgtatttcttacatgtatttgattgatgtctcatgcctccctaaaatgcataaaaccaagctgtgccccgcccaccttcggcatgtgttctcaggacctcctgagggccatgtcatgggccatggtcactcatattttgctcagaataaatatcttcaaatattttacagagtttgactattactgtcaactattaaaaaacaagtcaatgtataacttagaaggtggacaggacagaaacattggattacactataaattaggaaagggatatgataggagttaaaacagtctaagatctatgattattcaggaaaataataaaaatgttcattttctttagacttttaaatttaaatatccatgggggcatttcatcccaactgagggcagacttccgaaaaataatgaagaattaaacacatgcatttaccgtgattcttcctgaaacccttattaaaaccacattaatagaatttaaaaggtttaaaaaaaaaaaaaaaaaaagcctgaaggcagaaagacaaagataacagggtagaagacaatatcaacattttgggaactggaaggcagatagatgagagatactgactgaacacattccagacagctgaattctaaaccagcagtagtcaaagtgaaccttccaagaatttcaggatttgatggtatcaggatatttgagagtgaagcgaaggtggggctaaaaacagggagattggcttaagttagtttaaaaagaagttaagcggccaggcacagtggctcacgcctgtaatcccaggactttgggaggccaaggcgggaggatcatgaggtcaagtgatcgagaccatcctcgccaatatgttgaaacccccgtctctactataaacacaaaaattagccaggcgtggtggcgcacatttgtagtcccagctatttgggaggctgaggcaggagaatcgcttgaacccaggaggcagaggtcacagtgagccgagatcgcgctactgtactccagcctggtgcagagtgagactccgtctcaaaaaaaaaagtgtatgtatttatacattcattgcttgggagtaaacaggtaacttttggatggtattaacccataaagccaatgttcctggtaatgtaaatagaacacactagaaagaaattttcatttcttttttttttgagacagagtttcgctcttgttgcccaggctggagtgcaatggcgcgatctccacccaccaccgcctcccaggttcaagcgattctcctgccttagcctcccgagtagctgggattacaggcatgtgccaccacacccggctaattttgtatttttagtagagatggggtttctccatgttagttaggctgatctcgaactcacgacctcaggtgatctgcccgcctcggcatcccaaagtgctgggattacaggcgtgagccactgtgactggcgaaatcttcatttcttaagaacagcattatcatttttcagaaaacagaaaaattagcagcagtttcacatataatagaaagtttcttggcctggcgcagtgactcacgcctgtaatcctagcactttgggaggctgaggcaggcaaatcacctgaggtcaggggtttgagaccagtctagccaacatgacgaaacccccatctctgctagaaatacaaaaatagccgggtgtggtggtgcatgcctgtaatcccagctacacgtgaggctgaggcagaattgcttgaacccgggaggcgaagttgcagtgagccgagatcatgccactgcactccagcctgggtgacagatggagatccgtcccaaaaaaaaaaaaaaaaaaaagagagtttcttaattcacatgtcttcatattccaagctgagaagagatgaaaatcctttaattcttaagtataaattaacctttgaatatgattgtaggattttaataatctatgggtgtgttcatagatctattagtgctgagacatttttgtaaggatggatgctttattaaccacagttatttgtgtatctgtaattatagccttgatggagcaaggatcatcacctttaagctggtttagaggctatataatgtggagtgcttggtgcattactaagacagggcaattcacttaatggctgtgcactatttcttagcttggtttgaagacaaaaaagaataatttatatgttccagaataaatgagattatcttattatagcttccagaagacataatttccaagctgacaacagccacaaatgcattttaaggtgtctttaatatatttcacataactgcataattttagctactgtttatgaaataatttagtcacaaaccaaagtctaaaaatgacttcatgtaactttttaaagaacaatacttccccaaataagatcgactgcttctttcaagattatttaaatcttagaatggtacattttaaaaaaatctgtgttcagtaatctaaagcagcagaaaaaaattgatgtaaaacttacgttttaaaaaacgcattctgggctgggcacagtggctcacggctgtaatcccagcactttgggaggccaaggtgggcgatcacctgaggtcaggagatctagaccatcctggctaacatgatgaaaccctgtctctactaaaaatacaaaaattagccgggtgtggtggagtgcacctgtagtccctgctactcaggaggctgaggcaggagaatcgcttgaatccaggaggccaaggttgcagtgggcgagatcacgccactgcactccagcctgggcgacagagcgagatcctgtccccctctcccaaaaaagcacattctgaaaagatatatttaaggtgcaatgatttgttgttgcacagatacttaaattttattaacatattgccatagaaaataagcattcaattcaacttgagaaatacttgagaacctagtatgtgctttcagaagtgacgaagacaaaaaaaaaatgtgctttttcagccttctagaagtatttagaacaagaaaagtgattaataggtatgcaaatgcctaacacagaaggaggcaaaagctaagaattagaagaaaaagtaccaggaaagggattaagataaaaatccttttgggtagttgttgttcctcttcctcctcctcctccttcctcctcccttcgtcctcccggtcctcctccctcctcctcctaaatcctttcgggtaattcctcccccccccctcctcctcctaaatccttttgggtaattcttcctcctcctcctcctccttttcttcttctttctgcttccttctccttcttggatcaaggctctctgcaacctctgcctcctgggctcactttattagctccacttactgagatcctgcttaccgggttcctgcacatagtaagtggaagataacaaaactaatattggataatatttgtcctcctacctcagcctccggagtagctgggactacaggcactgcgcgccatcacatccggctcattttttatttttagtagatatggggggtcttgccatgttgcccaggctggtctcgaacgcctgggctcaggcgatcgtccacctctgcctcccaacatgctgggagttcgagaccagcctggcccatatggtgaaaccccgtctctactaaaaatacaaaaattagccgggcgtggtggcgcgcgcctgtagtcccaggtactcgggaagctgaagcagaagaatcgcttgaaccttggaggcggaggttgcagtgagccgagatggggtcactgaactccagcctgggcgacagagcgagtatagaaaagttctcgtagaacactgttaaacagatgaacaacttcaatacttgctcttctctgcttgatttcatttagtgtggtgagtaaaaatttaaattccaaatattatttacacgcaattatatccagtagaattcctgtttgctcaaatgggaagtccctagccgttactcatgttgtcttacgtctgtattgaactcttattagtttgtaaaagctttggcagaactttacaatcagatggtatgattttgcaaagccacttcctcttactaccactggtcatctgtcatttattgggctgccgtaaagcaggattccccttaaatcaaattaaattggaatcacttgagtaaggctcaggtactagtatatatatacatatatagatagatagatagatagatatattttttttttttttgagacggagtctcgctgtgtcgcccaggctggagtgcagtggcgcaatctcggctcactgcaagctccccctcccggggttcacgccattctcctgcctcagcctcccgagtcgctgggactacaggcgcctgcaaccacgcctggctaattttttgtatttttagtagagacagggtttcaccgtgttagccaggatggtctcgatctcctgacctcatgatccgcccgcctgggcccccaaagtgctgggattacaggcgtgagtcaccgcgcccagccaggcactagtatttttaaaacattctccaagtaattttcatgtgcagccagaattgcaactcaccaggctaaactgcagttgcgcaattctggtcttcttgatacctgatttctttgccccttctcttttctggttcaatgcataataagaattttccaatattagttttattagcttccacttactgaattctgcttacgggggttcctgcttagtctagatagtaagcaggaacttacaaactatgtaagcttatagactacataagcaggaaccctgtaagcaagaactcagtaagtggaagctaattaaaactacgtgccaggcagggtgccaagcattttttgtgcattatctcatttaactttcatagcaaccccgaagtaggtgccatttctatgaaacctgcccagttactgccccactccgcggaataagctcttacccaccgctcctcttcttcaattcatttctgttatggaactgtcgcggcactacaaagtctctatgtagttataaataaacgttatctggaagagcagccgacaacaactttcaagatctccaattccccgaccccacactccaactgacgccttcaaccacaactactgagccccactttcaaagctcactcactaatattggataatagttgtctgcctacctcagcctccggagtagctgggactatagcgtcttactagccagcttcagggctagaatagcctttctgtgcaagtggaaaaaacctcaggtatttcccaaatcggtagctgcagaggggctctatccctaccagagatggagaaaagccctctcgcgctttttatgtcagccagagcggctcgttaagagagcgaaggccaggggctgcacaggtcgcatcccgtgagcatgaggtcagagaacctgcccctggggcaaaccgcgaggggtgggacgggtgggtgcaggcggggcggagggtaggagccgccctagtggcggcccctgggagtgtcccgtgcctcgccttaaaggagggcgccaacgcaatttcagtatgtgggagacgggctgccccacccccgcgcgcaaaaccctggtttagcttaagggatggaggcggggacccctgcgcaggcttgcggcgtgggaggcggccgcccgcgacctacgacgccgcgcgccgggaggctgagagttcggcgccgggagggtcccggggacagaagagcgcctcgcccggttgccaaggcaaccccacgcggctggagaagccggcgctcgcagcccggcccgggccgctgccggaagtgacgcgagttcacctgccgagcgggggctgggaggaggggcggagggtgcagaggtgccgccgccgccgcgagccagtcgggagcgcgcgaggcgcggggagcctgggaccaggagcgagagccgcctacctgcagccgccgcccacggcacggcagccaccatggcgctcctgctgtgcttcgtgctcctgtgcggagtagtgggtgagtaggggccatggggtcctcagcacccgcccagcccgggggcgctcgctgcccgcggccacccaggaacaatggggcgtgggggagggggcgggcgcgatttgggggcgctgctgcaggggcggcggggcgggcagaattgcacaggggcgcttttgctgggccgggcgctcctggagccgtcccgtagggagccgcgcagggcgcgcggagtgcccggggacggagccctcggcggggggtggaggcggaggggctcgggcgcggcgtgtcgggtgcgcctcgcagctctcccatagcattctctgccccggtgcgggcttgcctttctttgctctcgccgtctcccttgtcagccttcgtgtcggttctctccagcgttacccgatttcaaaaaccttgggcggcgagttttcaggtgtcgagtcgcccaggcggggaggctgaattgcaaacgccattattcaatggacatggagctgcccggtgcctcggatcggccaggctacctctaggaaagaggcgctgagcgaacgccagcctggacggtgttagtctcctggaagcagctcgcccaggcaggagctgctaaccagacgcgcattgtgaaggagaccgtggaaaatcaaaagtgggttcctgcaaaaatgtagcattggtttctgcagtccttgggcgaagtgcaaaggagaattcagtgacctcgtttttgagtttgtaatgagtcgttcattttggagataagacgggctgagttgtacagggtaattgctagaggatttgccaagtgcgtttgtcgactgctcctttctctgggaggggaaaaaaggcatgtgaaaaatgcgtggaccattaggaggcgtaatcattttgacactttaaaaaacggattttccatgtcggtgttttaaccaactgatcttgtttgtcaaactaagcacttgctgcgttttataaccaaataattcatttttaaaaatccgtaggtgggatcctaggaggcgcacttagtatagcctctggaagggtaattttttgttgttaggtgctctgaagcaggatctagtggccctttctgttgggatggctctctgcttcctgttgaaatgttaattccattgttggatgccacagctgtgagcattactcatgggatcaacattctattagcaagtctaatcttcgatctgagcctatagcactacctccacctttttgatatatatcatttagacttggcgggctgaaatgtccaaagtaagccttccggagaagatgaagggtcatagaaccagtttacaggtacattcccacctttctttcttttttttcttttttttgtctaggccgaacctgaagatgaagttgagaacacagtgtgttctctgggaaaaaaaaaaaaaatagttttagaccacatctaaagcagaaaagtggaagaacataaattatgtggaggaacttttttttttttttaaatggagtttcgctcttgttgcacaggctggagtgcaatggcgtgatcttggctcaccacaacctccgccccccgcgtttaagcgattctcctgcctcagcctcctgagtagctgggattacaggcaccccccaccatgcccggctaacttttttatttttagtagaaaccatgttggtcaggctggtctcaaactcccgacctcaggtgatccgcctccctcagcctcccagagtcctgggattacaagcgtgagccaccatgcctggcaggaactagttgttgttgttttaacgggaatatttagataattggatttaattttttttttttggaatgcctcactttgataggcacaattctaagaaataatattttgatgcagagagtcattgtgctcataaggtatacacgggtacagtgaacatctactcgaagggccagtgtctcagctaaacaaggcaactatctttattccagtttttcagtttaagaacagctgaggccaggcacggtgcttgtaatcccagcaatttgggaggttgagacgggagggtcatttgagtgtaggagtttgagaccagcctgggcaacatggcgagaccgcatttctacaaaaaatacaacaaaataaaacccaaaaagaactagctaggtgcagtgatgcttgtcatagtcccagctacgcgggaggctgagatgggaggtttgccggagcctgggaggtctaagctcatgaggtctaagatcatgacgctgctctcgagcctgggcgacagagtgagactctgtctcaaaaaaaaaaagaagacatactaattgatgaatggctttatttcttcagatatttctgaccatttagaaatgcattggtatgggccgggcgcggtggctcacgcctgtaatcccagcactttgggaggccgaggcgggcagatcatgaggttaggagatcgagaccatcctggctaacacggtgaaaccccgtccctactaaaaatacaaaaaaattagccgagcctggtggcaggcgcctgtagtaccagctgaggctgaggcaggagaatggcgtgaacccgggaggcgtagcttgcagtgagcccacatcgcgccactgcattccagcctgggcgacagagctagactccgtctctgaaacaaataaacaaaaaaaaaggcattgttattaactcaagttcactgttaacatgattgactcctactttagcaaaacaagggaaagactcattcagattataccgtcagtgatagatattcctccagctctgaaacagttttgtggtatactctggctgcagatgggactcctttcgatgcatttttattggctgcctactagtgagtcatactactagtaatcagtagtagcagcagtagtaagcagtggcagtagcagtagtagtaaaattaaacccttgatcagttatgaaatgccagatactgttctaagggctttacatacctatatattcaatccaccaagcaacccgagagggtatttattatacttatccctgttgtacaaatagagaaacagaggcacagagtcgttatataattaacttgtgaagatcacagatttgctcttgaatctgtgttctcatcacactatgctcttctgtccctacagcagccactttctcttactaccactggtcatctgtcatttattaagaacctactgttggtttgactgtgtgtcaaatactgaaggcttttattattagctctttaatgtcatagtcttaattgaatactttgaggcattgtgaggacactagtttctccagggcttgggttgacattgtaaactaatgtggcctagggacctgcagcgtcagcattacttagggatcttgttaaagtttggggtggtgttcttcaattgccaacatgaatggaactaaaaaagtctggtctcccaacctcttgttagctatttgatggtggccaagcctcactgtgtgtctgttgccttacgtgtcaagaatggggatcctggagcaggtaatgggggttgaaggtggaagggttgggtagatgttggtcaagggatacaaaattaaatccattatccaacatggtgactatagttaataacaatgtattatatttttgaaaattgctatgagtggattttaagtgttctcaccacaaaaagtatgtgaggtaatgcatatgttaattccctggatttaaccatttcacaaggcacacatatttcaaaataatgtgttatatgtagataaacatacacaatttttgtcaatgaaaaatagaaaaaaaacagaaaaataccaaatttataaaataaattgaggtgtttggatgaaaaaaaatacaagagctttgccttcatgtctgtagatctcttaatatattattggtcttgcatctcagatatcaaataaaggtacctagcttgacacaaaagttggtagctgcaaggttaagctgtattagtttgatgatgggccaggaaatgatatattttctaaattttatccttaaatattggctgtaacaaatgctgatatagcaaaacgtaagcttctattagacagcaagagggaaacttgagtgaatgaatgcaacttacctccaagtcctcttaaaggaggtaaaataataaatactgtgttttaccagtgctccccccaaagcattattctaagcatgcaggagggtatagtgagcagctacaatagtaagatccaacccagaggtaggttcaaggccaagagtaggagagtggttgaggaaatcctcctagggccagtaccatttcatagaatgcccatttgtgttgggggatgagtctggcctattttcttctgattcaaaagcacattcccaatttcaaccttgctgaaaaagaggcatttttgtacctgctattaagaacagctaggatacaggataaggctggcataaaattatttagcaagcacatgctagctattccagtttgaaatctaccaaactgtaaaatcggggagaaataaaaagttgaagttgttgttcctcaagatgagggaacaaaatcttacaaaaggtgggattaggcactcgcttaactctatatggagaacatccttctcaagctaggtggaagatgaggaagaatattaccaaaagctgaccaggccatttggagaccaaaaggaaaggaaaaaaggcatttaggaagcaagctagtaaaagaagttcttctgggtctgactaggtaagtgaatctaagggaaccataccaaagatatgttacccattactccagcatgaagccagtggcaaaatacctcaagacattttaaacccagagaagtgtatgaaaaatatgatagttaaccaagcagattaaaatcaaaccactaatggtaaaaatctcttcagatctgaaatccaagatactcactttccattaattctgtgttttatagggggaaaagaaaagtaacaaatgtaaagattttttttatttctactggggagggaggaggataaatagaactgttttccaatttgctctccactgtatacacacatacccacacacatacataagcaaacatacaccaaaaataccccaaaccaaaaacaaaaaaaccaggaatcaaaacccagaacaccctcaaactgcaccaatacttcatattttgaccaaaaaaatatcctgagaggaaggcaaaatgcaaaatcaaatgacagaaaaatgctgaacagcattattaatatacaaaatatttatattagtgaactagtaacaggtgatgttctctgtgtctgtaaaactttggaaccacatagctgatttgttcaatctagtccatgccagcttccaaaaaccatgccagcttcattctttgatgcctcatcaaaattttctacaagatcgggaacatcatcatcctcctcatcagtgtcttctggttttgctgctttactgtccaagacttgccgtgggaactgttcagctaacttcctaaggcttgttaaactgtcagcaccaagctgacttaatattccaggtatcatttctgtgattggtttggcttctgcatgaccagtaattgcaaaggtgttagcagaaagggaagcttggactttgggattgttgaagtgaataactgtcccatcatctttaatcatgttcatctcttcaataccaactatattattcacagccagtttttttagagaactctgaagctttttgtcatcagccatggctgttttatgtaccaccttctttctgcgagctgtacccttgccccctatccggacctgagcctgaagtttggctaacttttcttgattcatgctgttggtaaatctgaagcagggagggtcctccagcaccagcacgcggcaagagcaagatggctgcccgatatgccccctcttaatcttttcattcctgcgattataccaccatcagaggaaaaatgcctcccctccaaggcaagcctccctacattggctccttaccctgtctgttgtggggtctccatcgattaccaacttagctcactgcactagatcagaggacagggccattacctatattcattgttgcagtccctgcatggtcttgtggctcctggcagacagctagtgttcagcaagtcctttttgcatgactgaaagttttcaacttctttgccactaggcctgtgtgtatgatagagctctcttcagttcatcactctctcccttctcatctaataaagatggtccttacagtgattattccactagtcatgtctgagtcagtttttaatctaaagaagctgagcttctgctttatctttgacctcgttctattttttctcctgcttcagttgccaaaggttacagtaatgcatgtgccaaattggtttatctctttggaactccttgacacctattttggttctttcccaccctgttgacctgcgctttactgtcttctaaaataggtcccttaaatgtcagccttccttatagtttagcccatagtcaatcttgaccttaaacctgggtgacctcttgtatccatcatggtaatctcccaagtattggtagtgaattaaaaatattttcagctcccagcctggccaacatggtgaaaccctgtctgtactaaaaatacaaaaattagccaggtgtggtgatgtgcgtctgtaatcccagctactcaggaggctgaagcaggagaattgcttgaagctgggaggctgaggtttcagtgagctgagatcgcgccactgcactccagcctgggtgacagagcgagactccatctcaaaataaattatatgtatacacacacacacacacgcacgcacatgcacacacacacatatatatataaaatatatatttgcacctcaacccacctctgctttggatcctgggccactatttccaactgcgtaactattcaacttccattcgaatacctaacactcttcactctccaagtacactcacctgttaattaagtgatacttaatgtactgatactactatgtgcaaagccatgtgccaggtgcccctacaatagaacatgacattgcaagttgcaaaagctttggcagaattttccagtcagatggtacagcttttgcaaagacatagagatctgaagggtttgatatgtcttgggagttgagtagttcagtgcatgtaaggcacctaaccagtgcttctcaaactttgtgcatctgaatgattcttacaaggaagtctaggtggggcttgtgagtttgcattttaacaagttttacatgatgtcactgctgaccacgttttgtgtgggcaaagatctaaaggccatactgagagcttggtgggagctgacaggtctgtcaggttatgcaccctaaccccacggtactaagacatttgtggaagtgtcgagaagtaaggttatacgctgagatttattttattgaatggtagctatgtagcagttctcaaggaaggtagaactgatagagctaacacaggaatcctctgggatgatctggacgtaagcagtccctgttgaaacgcagcagaagagagttgggcttctgctttgatctggaaagcttttctgaagaagatagtagtggaacctgatgtctggttgcttgaatgagtagcatgaaaaagttggagagatttctggcttgagtgtataatgatgtcactaacctacgggaaataaaaaggagcaggttttagggagatgacaatgagcttaagtttggacaggtagtatttgaggtgcctgagaggcaaggaggtaaaaaaatatctgataggaagattgcaacacaggactggatttcaggaaagagacagacattggtgatacagacttgagaattcactgctgttaggtggcgtctgtataaagttaaggaggaaatgcaggtaggactagaagagaaggtgaaatgtgaggcgggggaaacatgaacttctaataagtacatgaggaagcagctgggagtaagaaggagtgataggggatataggagacctagaggatgaaggtgtcctagagaatgatgcaaaagtgaggctagtgggttttagcactgggagactgttgagaacattcagaaagttcccatggggaagacagctctgcagaggtgagagtgaagccagattttattattattattattattttgagacggagtcttgttctgttacccaggctggagtgcagtggcacgatcacggttcactacaacttccacctcctgggttcaagcgattctcctgcctcagcgtcccgagtagctgggaatacaggtgcccgccaccacacctggctaatttttttatttttagtagagatggggcttcgccatgttggccaggctggtctcgaactcctgacctcaggtgatccaccctccttggcttcccaaagtgctgggattataggcgtgagccaccgcacctggccaggctccaaattttgatagaggagtgggcatcaggtaagtggagagtgaaaaataaacttcacatttgcaggtggtttgacagtgaagctttgcatgtgtggccttaattccagaggacagtagcatatcccaggggagaaggtagaagccagcagataaagactcttttaacttccctccatctaggcctacaatcttgtccacatcatcattccacaaaacatggtatttctccttaaggccaattcctgaacttcagaccttttggcttctcagggatgtcactctgttatcccatctattatatctggattccgtcaactttaaccaagcttatttatccctctttatattccttcggtactgttgtcgctttgcctttattttttatttttaaattatttatttttttgagacagtgtctctctctcttgcccacgctggagtgcagtgggctcaggtgattcttctatctcagccctcaagtagctgggactacaggcacctaggcttatttttcttctttcttccttttttttttggagacggagttttgctcttgttgcccaggctagagtgcaatggcgcgatctcgactcaccgcaacctctgcctcccgggttcaagtgattctcctgcctcagcctcccgagtagctgggattacaggcatgcaccaccacgcctgggtaattttgtatttttagtagagcgggggtttctccatgttagtcaggctggttgtgaactcccgacctcaggtgatccgcccgcctcggcctccgaaagtgctgggattacaggtgtgagccactgcgctcagcctttatttttctttattaaccagatttctggaaaaaatagcctgcatgtactgactgcattattttctttcatgcccactaattcttccatcctttgcaatctaattttcatccccttctacttctatgaaactgcagttgctgtagattgcagttgacactgtggctacatccggtggtcacatcgtatcttcagcctcttaaacctcagcacaaatagctctattgaacagtttctttctgctcttgagctattcctcatttccttttgtatggtccatttccttcgtgtaccgtaaatgccaacatttctcagtttatgggtgcagttactgtttatttgcctacagtctccagtacatttctagtctcccttctccaactttacccacatcaaaaccatccacttaatgtctctacacacacttcccacaggcatctccagctgattctgtttcacactcttctctctcatattaattggcattttcagacaccaaaatgcccaggcaaaaatatgaatatcttacttggcctttcctattttcccatctgctcatatccaatttcgaagtcattgtgtccctccagccactacctgtaatctaggttataccattctctcttcagcttgttgagatgctttcataattggcctcctgttgagtgaactttaccctgtcctccaggcacatcctgttacttactgcagcatgttctaacctttatcaagcatgccgatactgtcattgttttctcttgccagaatgtacatttcataggtcaggcactgtttacattgtattcccagtatatggcacagggcatgttcattgcataaatggggaaagttatgctagacaggaattcatgtttgtaggcttgggaaggacctagaagagaaagagcatttgaagatcaagaataggtacctcatggaagaggtgagcagggctgggctctgtgtcctgcacaggtcagctttgtgtcagctttgccaggtgttcaggagtggagtttatatcaccactcacatttagttctcctacttgcagccagttctctccccttcccttatttccacctttcatctgtcatagaagtcatcatcagatgagagttgatgctttgtgtcattaaataaaggaaataattgaggctgggaactttggattcagtttatttggtggctagcaagtagttgatgtgaagataattattaaattaaattaattattaaaataagataattattaaaataatgcagaaaacaattaaaaattatccaaccagaatgaccttatgggtttatcttactgtctttcatctaacttctgtttcttaagaaaacaaacctagtaatctagaataataattgttcaattgggtttggatttaggttggttctttttatttttctttttcttttttaaacagagtcttgctctgtcgcccaggctggagtgcagtggcgcgatctcggttcactgcaacctccgcctcccaggtttaagcaattctcctgcctcagcctcccaagcagctaggattacaggcgctcaccaccatgcccaggcgattttgtgtgtgtgtgtgcgtgtgtgtgtgtgtgtgtgtgtgtatttttagtagagttggggtttcaccatgttggccagcctggtcttgaacttctgacctcaggtgatccacccacctcagcctcccaaagtgctgggattacacgtgtgagccactgtgcctggcctacattgatctcttctgtgccttcccatttgtctttcttccctcaacttattgcctcacccattcttttttcagtagttacccagggccaggcgtggtggctcatgcctgtaattccagcacttgtgggaggccgaagcaggcggatcacctgaggtcaggcattcgagaccagcctggccaacatagtgaaaccctgtctctactaaaaatacaaaaatcagctgggcgtggtggtgtgtgcctgtaatctcagctacctaagaggctgaatcaggagctacccaggaggagaatcgctggaacccgggaggcagaggctgcagtgagccgagatcatgccactgcactccagcctgggcaacagagcaagactctatctcaaaaaaaaaaaaaaaaaaaaaaaaaaagccagttagaggctgggagtggtggtgtgcgcctgtaattccagcactttggaaggctgaggtgggagaatcacttgagctcaagattagcctgtgcaacataacaagacctcatctctacaaaaaatacaaaaattagccacgtgtgatacaaaaattagccgggtgtggtggcacgttcctgtagtcccagctattcgggaggctgaggtaggagaatcacttgagcccaggaggtcaaggctgcagtgagctatgattgcaccaccgcactccagcctgggcgacagagtgaaaccctgtgtccaaaaaaagttagccaattagacttaaattaagcctttgagtttaagttgactcaagtttttgtagtttatttcagttggtggggtgtttgcagaagaaaagactttcttgatctattgataaaaaaaggaagataggaaaagggaaggagataatagtaacaatatttttagggtaagtgtgagatcagtggtatggttcagtttgtcctttggtacttggtgagaaaaaggattaacaattaaattaaccaacatttatacatactaagaaaatgcaaatttctttggaaacgttaaaatcattttcattctttcaaagatatttcttacaaagtggaatgggaatggttttaatttcatttacttctaagaaataaaagtatgttaagattttaagaagaaacaacataactaattgcagttattttttcactttcccatcgttagatgtgtgttctatgtgagttttagacattttcagaggaagggtggattgactgtatgtttgaagtcctctcaaggaatctcaagggacatacaatgaactaaatgtgttcagcccccacctttgttcagttgttggagtgactatcacttattctcttcagtctctctcacatgtattttaaacacttgaatactggacagttcccatgggagatttctgtcaaggaccagatacaaacttttgactttgttttgtgccagggtaattctgcaggaagaattgagaagactcttaacttactcagttgtacagtggaaatctgatacttctagaatgaacttgtaaatctggatgagcaaaatgatcatatcttatttttaaagacaattgcacacgcatctcatttagagccactctcttaaccttgggatagaaaggacacatcatattattctcatgtataggaaacaagtcctaaagcccaggcaattgtggcattggtgttagaacagtgctgtccaacagaaatataatgcaagccacatatgtaatttaaaatttgctagtagccacattaaaaggcaaaaagaaaaatgtgaaatgaaacaatatattttgtttaacacaatacatacaaaatatgcttttttccccatgtattcaaatgaaaaatattgggatattaaaatgtttttcgtactttgccagaatctggtcagtgtttgacctacagcacatctcatttgcactagccatgtttcaagtgccagcagctactgtattggtcagcactaggagttttagttccagtcatcttccaccatagtcctagaacatttaacctgaaaaagcatgggggcagtgtgccatcaaaacagctttctcaaatggaacatgcctttggaatagttctcatgagattttacttctaaaatcgttattttttttttgtcacatagtatttgtttcctgttagcgatgagctaaaatagtttcttatttcttacttaatctcttgtagtcatcaaaacatttgttacaggcacacaaaattgtatcagctctccttattccatagttaaagccaatcacatcttgagtataaagcagaaaagtatatgcataataattatatttttaatttgcctaggtggggaaataaatgcatttatggaaaggtccaaaagaagcaggatagaatggccccaggtaatggttgctggggaaatttgaattcacttagagttattaaaaaggaatctataccaagattggggcaatcaggttagacatgctcacaacagggataattttcttattggagttaactttttcttcattaacttcaggacttttctataaggaaatacactatttgctcattttgctaataacatctgtgtctatttcttggatatcttattttctgtgatcacatctttataagacacttcatctgggtgggttttggtgttttgtttttgtttttgttttgctaaatagtcacttttcctgtctcatgttaattgaagaggaagagaagcgagctgcaagttttatatgagccaggaggcaaaggaagatttccttatatggagtgatacatattattctatgaaggtgatgaaaatattcaccatggcaactgatctgccttacccataatgcaaaataccctatttgcatttattttgccagagaattctgaaattaggatctatgtagtagagaatatgaggaaggtaatatactatttcggttgaaaaggagaataatttttcttttgactcgtcaagtgcagtagtaagaaggggggaagagaagaacaaagagttggatctgtaactgtgaacaattgattgaaataattcactacttttagaccaaccaagaagaagaatagttttgaccagaattggaatttgaacgctcccccaagttgagtatgtctgtgtgctagtggagtggggaagggttgagtcacaatccagttcagcaaatctctgccaggatgtttactttttagctccccttatctgattttccattgtaaatttgtattaaatatttctgataagcagcctcaattcttgtggaagtttgagggcaaataaataatatgtacttatgggcaaggcattgtaatagttgcttcaggagatttaaatgagtaacacaccattctagtactcttggcaagcttaaatccagagggaggagtcagacaattattcgtgcagctatggtaccaggcagagcaaggcaggaatcatagcagatatgctatctgaaaatgtaaggtattctgattattccttccatgccttaactggcatctctaaaccatttttccttccaccttgggaacccctcatcctttgagacttctgccctttgcttatatctaacttatagttgctgctccttttttatttttttatttttatttatttatttatttattttttaatgagacggaatctcgctctgtcgcccaggctggaatgcagcctgcttctccttgttgacaggaaatgctcagcttcacattcaccccctgccccagcattatccggcattttagtatttacgttttacaatgcacttttctaacatccttacaccacattttcttgacctttcaaatacagtgaaaggtattttttagcaattttacttaggcagtgctctccttatgcttagttctttctttttttttttttttttttttttgagacagagtctggctctgtcgcccaggccggattgcagtggtgagatcacagctcactgcaagctctgcctcctgggttcacaccattctcctgcctcaccctctcgagtagctgggactacaggtgcctgccacctcacccagctaatttttttgtatttttagtaaagacggggtttcaccatgttgtccaggatggtctcaatttcctgacctcgtgattcgcctgccttggcctcccaaagtgctgggattacaggtgtgagccaccgcgcccggcatgcttagttcttttttcttttttcccacgctaaaccagagaccctttttttgaaatggagtttcgctcgttacccaggctggagtgcagtggcgcgatctcggctcaccgtaacctccacctcccgggttcaagcgattctcctacctcagcctcccgagtagctgggactacaggcatgcgccaccacgcccagctaattttttgtattttttagtagagacggggtttcttcatgttggtcaggctggtcttgaactcccgatctcaggtgatccgcccaccttggcctcccaaagtgctgggattacaagcgtgaggcagcacgcccggccaaccagagaccctttaatgcttagatcttcacttctaaaatcttgaactctaatatcatgcctcccagctttctcattctgcatcacaccttctccttaatatcagtgaggcctccagagcctttcccaactctcacacccctactggtcttctggctactttaaaaccagaatttcgtcactagtcctggtcagactccagctcccgttcctgatgtggatcagttctccggggcagtttctttgctcctactcacggactgtgatgcacagctgtgtggcttggggaggtactttttattgtccaatttgactggactttttgtcttttttttttttttttttttttgagacagagtctcactctgtcacctaggctggagtgcagtggcgcgatctaggctcactgcaacctctgcctccctggttcaagcgattctcctgcctcagcctcctgagtagctgggattacaggagcccgccaccatgcctggctaatttttgtagtagagacgtggtttcaccatgttggtcaggctggtgtcgaactcctgacttcgtgattcacccgcctcggccttccaaagtgctgggattacaggcttgagccactgcacctggctttttttttgagacacagtttcattctccctcccaggctgcagtgcagtggcatgatcttagctcactgcaagctctgcctcccgggttcaagtgattctcatgcctcaacctgttgaacagctgggattacaggcatgtgccaccacgccctgctaatttttgtatttttaatagagatagggttttgccatgttggccaggctgatctcgaactcctgacctcaagtgatccacccaccttggtctcccaaagtgctaggattacaggtgtgagccactgcgcccggccgcctttttgaattaagtacattaataaagcgttagaacattatgtatttaacacaaagacaatttgaatttgcttttttgttgcttattccttcaggtattctaaaatttatttttaagtaaagcttttaattgaagttatgacatgcacagactaccacacagtttagaccattaatttttataaacgtacagggtagagcattgtcacaaagtggccacacctgcatacctagcaacctgatccggaaatagaacccaacccacatatcagaagccctgtcatgccccttccagtcccttcctttactatttttctttttctttttcttttttttttttaatttgagatggagtctcgctctgttgctcatgctggagtgtagtggcttgatctcgactcactgcaacctacacctcctgggttcaagcgattctcttccctcagcctcctgagtagctgggactacaggcgcatgccaccatgccaggctattttttttttttttttttgtattttttagtagagacggggtttcaccatactggccaggctggtctccaactcttgacctcaagtgatcaatcacccacctcggcctcccaaagtgctgggattacaggcgtgagccactgggcccggcctccttcacccttttttccactcttttctgatttctaacaatgtagattagtgttaacattttatataaatagaattttacagtttgtgttttttgtcttattttacttctcatgttggtaagattattcatgttgtgtagctttgttttattcatttgcattgctgtgtgatattctattatgtgactgtatcacaattgatttatttattctactgatggaccctttttcccagcttttttgccattatgaaataactactgtgaaggccgggcgtggtggctcacgcctgtaatcccagcacttcgagaggccaagatgggcctatcacttgaggttagcagttcaagaccaacctggtcaacatggtgaaaccccttctctactaaaaatacaaaaattagccgggcgtggtaatgcatgcctgtaatcccagctactagggaggctgaggcaggagaatcacttgagcccaggaggcagaggttgcggtgagccgagattgcactgttgcaccgcagcctaggcgacagagcgagactcagtctcaaaaaaaagaaaaagaaaatactactgtgacattatcctacatgtgttttcatgcatatgcacataaatttctccctatcaatggaatttctgagtcctgtaggttatacataagtttcactgtggttgatactgccagttagttttccaaagctaattgtaccagttgacacttcgatcaaagagtatgaaagttccagttgcggtcaggcgcagtggctcacgcctgtaatcccagcactttgggaggtcgaggtgggtggatcacgaggtcaggagttcaagaccagactggccagcgtggcgaaaccccatctttactaaaaatacaaagcttagttggtcgtggtggcagggcgcctataatcccagctattcaggaggctgaggcaggagaatcgcttgaaccagggaggcggaggttgcagtgagctgagtttgtgccattgcactctagcctgggcgacggaacgagactctgtctcaaaaaaaaaaaaagaaaagaaaaaagaaagttaagaaagttccagttgcgctacatccttatcatggccttctttcattttgactattctggtggatgtgttagtgccatctcattataattttcttttcttattctttttgttatggaaaatttcaaatatatgtaaaactagagaaaattatttggcacatcccagtatatctttgctcagctttatcaactctcagctcatgtcagactttttctgctgctctgttgactctgatttgtttcgccattcctcctcacaggtgtctcagacttggaccagtctctaaaattctctacctacaaaatgttcagcctcttgtattttaagttaatattgtagtccccgtttgtcacagaggatatcaggtacaaattcttgcaatttcttgtactctaatgtgtaaacttaacgataagtgtgccaatgtttacatctttccttcaatctctttttggttttttagagttaaggtctcactgtattgtccaggctggttgagcaagtgatgctccctccttgtctcccgaagtgttgagattacaggcttgagctacggtacctagggtctaataaaaggtgtcttattcctgatatttgttttttgggttttttttttttttggtggtgggggacagggtctttttctgtcacccaagctggaatgcagtgatgcagtcacaactcactgcagcctcgacctcccaggctcccacctcagtctccgtagtagctgggactgcaggcatgcaccaccacgtacaactaacttaaaaattttttttttagagatggtgccttcctatgttgcccaggttggtctcaaactcctgggcctaagcagtcttcctgccccaacctcccaaagtgttgctattacaggtgtggtgaacaggtccttattgacagttttctaggtctcattcttttttgagggcttgatcttttagtctctggtgtttggctataagatttttaacgtctcctattctatttgctttttccttttgacttataaatgtactcaatgtttcccatttcaaaaagaacctttccttgaccacatatcatacactgtctattttctcccctcatcgagaacaaatttctcaaactagtagtcatttctgtctttgctcacatctctcaagcactgtggtcagataatatcctgttgcagctccccaaaaccttcactaaatctgatttggcctaggacaccgatgatgttctaattgccaaatctagtggatacatttcagtgtcattttttttacataataaattgtgagttcttcctagtggaaggcactgctaaatgccttttaaatataaaagatgacaagacatagggttatgtatcatagtagaagtattaggcttatcagatgacagtgaattgcctactagctactatttattgaagagtgaacaccaggatgtgctgcagctgttctaagaggtttacatgtgttatttaatttctccaatgaagtaggcattattatttttaatcttcattttagagaggaaaacatctagtcacggagaggctagaaattgcctgtggccaagcatttagtgagataaatttgaatctgaacccagatctaactttagaactcctactgtttaagaaatgtctgcatttgttgggagctggactcagagaactcctgctaatgcctttgagatgtggatacaggggaggagaagaaatgattgtcagggaaggcttcttgttggttgattgatcaatgggctagaattagaacatacttagttaggtctgaaatagataatttagttcaacacccctaatttacatttgagccctagggaagcaacttgtccaaaatcatacagagcttttttgtgtaataaatttggcaacagtcagataacctagtctgacatttatttttctgtttttccaaaaaaagaaaaagtttcacccaaacccctgaaccatgtgccacctaaaatgctactagaaatgtagcatagaagaagagtataaattccaaacatttctctaccatggtgattggaataggatttctaataatgcacccattgtattttatagtgacttcagaaatgaaatctttattactgttgtatgatgttcgtggattgacttctacatacagagtgagtgtggctccagaatcagtcggcctagatttgaatcttgctccttcagtagcttagatgtgtctcagtgtgtttgtttcttcattgcaaaacacggatgcataatattagtacctttttcttggagttgttatgagaatggaaagagttaatacgtgtagggcattttgaaaagtgcttggtctgtcataagcactcagtaactgtttagttgctgtttattgttaaggtgatggtttccccatttctattccagtttatttcctgggggcctgctttttgatttctcattggggatagggagctgggaattgatatttgaaaagtacaaagaagagcaagtgtgtatacttatgccatttctcattgttactaatttatcttgctgtattaatttccttagctctgagtacatattaacagtctatactgagtaacactcgtgggaattaaagaactaaaactcctagacaatgaagagcataatttctacttccctgtattttcttctctttctcagcaatatatatatatatatatatagctatatatatatatatacacatatatatagctatatatatacacacacacacatatatatatatatatatatttttttttttttttttttttttttgagatggagtctcgctctgttacccaggctggagtgcagtggcgcgatcttggctcactgcaacctctgcctccgggtttcaagcgattcttctgcctctagctgggactacaggtgcctgccaccacacccggctagtttctgtatttttagtagagacggggtttcgccatgtgggccaggctggtcttgatgtcctgaccttgtgatctgcctgtctcagcctcccaaagtgctgggattacaggcgtgagccacggcacccggccttagcagtatttaaagccttagttggtagagttaattagtgttaacatatttaaagtgtttttcccttctagaaactgggatactcactatttagatgactttcaaatattgctaatctcaaagcaacttcctgggaagaagaaaggcaaaggttggagttagggtctggcagagggggaaaggaaatggtgcaaatagcatggtggtcacctttttgtatagagtttagagtatctcagtgacttgctaacctagacatctatagtatttgtaattaaatgcacaaaattacacttgtctttatcaatcttcttcttcattttctcgaacctctaaatctacttataaatcttttaacatactagttcctgatttgtctaacttattttcttccttttttttttttttgagaaggactcttgctctgtcaccaggctggagtgcaatggtgcaatcttggctcactgcagcccctgcctcccaggttccagtgattctcctgcctcagcctcctgggtagctgggattacaggcacatgccaccacgccaagctaatttttgtgtttttagtagagatggggtttcatcctggccaggctggtctcaaactcttgatttcaggtgatccgcctgccttggcctccgaaagtgctgggattataggcatgagccaccgcgcccggcctctaacttatttcttaaagttgctgtagtgaatcattttttgactattattgagtgtgtgttttgacacagcgtcttgctctgttgcccaggctggagggcagaggcgcagtcatggctcgttgcagcctcagcttcccaggctcaagtgattctcctattcagccttcctagtagctgggaccacaggcgtgcactaccacacctggctcatgttttgattttttgtaaatatgagctctcactatgatgtaccctgcttagatctaccatgcctggctaatttttttatttttttgtaggtatgaattctcactatgttgcccaggttggtcttgaactcctggactcaagtgatctttcctcctcagcgcctccgaaagtgctgggatggttacaggggtgagccatattattgtgtttttatagtaagtcttctgatttctatgattcgaattcagcattcacattcagaatgtgttctccctttaaaatagtaacccttatgacgggttttgacatttttcacaaagctcaatattaaataagttcttcataacatttggtattaaggtcatatcccctttccaagcaaccgaacaagcatgtaagactttggaatataaatttaagttcctcttattggctgggcacgttggcttacacctgtactcccagcattttgatagccccaggcaggtggatcgcctgagttcgggagttcaagaccagcctgaataacacagtgagaccccatctctacaaaaaaatacaaaaattagtggggcatggtggcgtgcacctgtagtcccagctactcgagaggctaaggtgggaggatggcttgagcccagcaggtggaggctgcagtgagccaagattgtgtcactgcactctagcctgggtgacagagccagactctgcctccaaaataaagaaaactcctgtttttatttgtaaaacttttcatttttttgttaatttctttggaatggcgccagatatttcgagaagaatcatgtatcagtgtgtaatcttttttcctttatttcatcctagagatagctgaaagataacagctcttttcgtctatagaatgaagaatacgtagttgtgattttagagtatccacaataaaagtttttcttaacatacttcttttatgtcaacaactatacataaagtagcatcagtgttcatttcttctcagatttgctaacatttctcatcaaaaaataagtatcctgtctttccttccatcagtatgtgaccaggctcgctcaattccctgagctgtttctcccatgtaggcttcattgttcgggttctttgcttctctggatgcacagtcaccccagggctcccttctcatgccttatggtcctctctcccatcaccggtctgccttcagatagctccttcctttcactttccctctactctgagctccctccttctacttgtccaaggctggaagggagaaggctgactgaataagtctagggacacaccctccagagaggaagcacgttcacttccagttaagttagtatgtgcttcagaatagggacatgtaaatacctagaggaaatgtataaaacagaggaggaagcaattaacactgcctgtggggatcaggggaacttctgagatgagctgacaagtaaagtgcattatttattttttttctttttgagacagtgtctcactctgtctcctaggctgaagtgcagtggtgtgatctcagctcactgcaacctctgcctccctggttcaagcaattctcctgcctcagcctcccaagtaactgggactacaggcgcccaccaccatgcccagctaattttttgtatttttaatagagacgcggtttcaccatgttggccaggctggtctcaaactcttgacctcaaatgatccgcccgtctcagcctcccaaagtgctgggattacaggcatgagccaccatgcccaacctaaaatgtattttgataaatgactagaggtgctctctggggacaaggtggagcaagagagaaaagggacttttacacatagaaggaaaagcatatgccaacagtgttccacacatgtggactgatttgtctttttccccttagtgcctcctctgatttgttgtttttattattggtcccagaccaaaacaatctcactgttgtggttcattttgttgtcaatttttttcactatttgtaaatgtaccgtcattcattcctagtgcaatttcccttctcttatacaaaggcacttgtgcctgtgaacattgttttgcctgccacttccctcagagatctcaaaattgttatctgcttacctccaggcatccagacttgcctgattgctgttttattgttacaacaaagtgctttgttgactgcttagatgtcaagacagattatgcagttatgcagttgcctaactcataattcatagctcctctctgtccctgcttgaattctacaatgagtcatgatctttaaaatccctgtgcatgtgccatcactgatcagggtttacatctagtatctttctgggataggttaaaaacacagaaaatatgtttcaaagtgttccttttgttttgtttcctcagcgatagaaaaaagaaaaccttcattcaacaaatatttgttgaatgccaagtgcccaaaattttgctctgctaaaaaaaaaccagtgatgatcaagaacagcatgagctttgccaccaaagtcaaatgtgaaatagtccctggaggcagagggtgagcgcagtttcagtaaagtgaggaaagtgcccgtgatgaaagcattgttagtgctagtccgaggagtaattagaggacatatgttctggaggaaggggctgaactgagaccatagtaagcctaaaaggtgggatggagcagaagaggaggtatctttttttttttctttttaagatggagtctctctctgttgcccaggctggagtgcagtggtgcgacctcggctcactgcaacctccacctcccgggttcaagccattctcctgcttcagcctcctgagcagctgagaccgtaggcatgtgccaccacgtccggctaatttttatattttagtagagatggggtttcaccgtgttagccaggatggtctcagatctcctgacctcgtgatccgcctgccttggcctcccacagtgctgggattacaggtgtgagccaccgcgcccagcaagaggaggtatcttacactgtgctcgtgctgagtgaggcgagatgatgatggagatgatgatggctgtattatactgtgggagtgggaagtggtaagaagctaaaggtgctagagggtggctagtcaaaggaccttgagggagaattaaggtgtctgaatcaatgaggagcgaccagagattgtcagacatgtcagtgacgtcttttttacaaaaggagttataggctggatgcagtgacccatgcctgtaattccagcactttgggaggctgaggtgggaggattacttgagccctggagttcaagaccagcttgggcaacataacgagactgcaactccactgggaaaataaaaataaaaataaaattagtgggcatggtggcacatacctgtagtcccagctccttgggaggctgaggcaggagaggatcccttgagcccaggggtttgaggccacagtgagccttggttgtgccacagcacttcagcctgggcaacagagtgagaccctgtttcaaaaaaatagataaataaaagcaattatatagagaacactctgggtgaagtatggagaacaagttagaatgagaaagtgtggttgcagggaagccagttagcaggctacatccaggccacgtgaaagataatagtggcctggatataggtaaaaatggttggatttggaatgtattaaagaggacatagtatgctttgaatgagtgaacgttgataccctgctgcctttcattttgtctccaggtttgtgcagatgattggtgatgcagctatttcttgcatctgtgatcttatgcagggattgattgccaaaagtgttggtagtaggtcacgtcactgagataaggagttcaaaggagaaatttagggttgtgctggggaaacaaacagtttgatcaaacatcatctcagcttgctgccactggtccccctgcctccaaatcaagtatgtgggttgaattataaaattacccccatattttcttgtgttattagaagtcttccagcccagctttaaaactgtcgctggtttgtgctttccttattttagattctcaggggatctacaaggatatccctattacctaaacagacttcttcctgctcttgaattttcttgtctcatatcctcatttttcttatttcagtgcctttatgatctttcacttccctcttctccttccacattagtctggattaagtaactggtattattcaacatttacttggattttgcataagaagcagttctttgatgtcattgtctgtaatgcctgttccacaggttttgtaaggatcagatgaaataattaaagccctttgcataatgcttgacttacagataagcaataaatttaaattcctgtgcacttctgtatattaatgtacataatttttttttctcctgagagggaccatccaggcagttccctcgtgtctttattggctaatggattgaaaagtacatttttccatcattttgcgaattcccaatatgtttaaatcttcttgagaatttctgctgaaatcattaccttcatgtccagttgaacagtataccctatccatgatgagaaacttcactgctctgtatgcagtctgtattagtctgctcaggctgccgtaacaaaatgccatagacaaaataccaatacaaaataccatagatgccttaaacaatagaaacttggtttttcacagctctggagtctgggcagtccaagattaagatgccagcaagtttggtttctggtgagggccctcttcctggctggtagacagctgccgtctccctctatcctcacgtggcagagagagtgctccggtatttccttctcttaagcggatgtcagttccttctgttctgggctctatgctatggcctcatttaatcttaatcacttccttaaaagccctacctctaatacagtcacataggaggtcagggattcaacatatgaattttgggggggacatgatttactctaccgccgtcccccaaaagtatttttattctattaatatatttattagtatacattatatgtttaatgttatgttccttttgaaagacctaatttcattcgatgattgtatttgctgttgggtgaatggaaccaaagctgaaggtggcaatatttagtcatacttctatttatatgagtgaaagtcagcattactccccagaagccaaattttagtagcatctttttgctggaggggactggttctacctgatctgtttgtccttgctctttgtctgaggtaggtgagcttgaatttcttactctgattttcctgactgttgttggacatttaggttgttttcagatgtttttgtgtttcagagagcatcagtgagtaatatccttgtacatatgagctgttcagttatgagagttcagctgcagttcctaaaagtggattagcacactgacatttcacacgtcttctactgcgttgacagtaggttgtgctgatttactttctgtgttgccacagtttccaacacttttgccaagattggccttattgaatttttttaaccaccgtcaattttatatttgaaatatgttacgttattctaatttatatttatttaattataaatatggttgtgtgctctcttgttaatcttttttaaaaatagactttattttgtacagcagttttagatttacagcaaaatcgagcagaaagtacagagttcccctgtacccctttcccccatgcaccaacatctccctcgcttgtcaacacgccccccaccagagtgtaccttgttaggattgatgaacccgtattgacataacattaccacctagagtccatagtttacatcggggttcactcttggttttgtacattctacgggtttggacaaatggatgacatgcagccaccattatagtattacacagaagcatttccctgccctaaaaatcctatgttccggctgggcgcggtggctcacgcctgtaatcccagcactttgggaggccgaggcgggcggatcacgaggtcaggagatcaagaccatcctggctaacacggcgaaaccccgtctctactaaaaatacaaaaaaaaaaattagccggacgtggtggtgggcacctgtagtcccagctacccgggaggcttgaggcaggagaatggcgtgaacctgggagacggagcttgcagtgagccaagatcgcgccactacattccagcccaggcgtcagagcaagactctgtctcaaaaaaaaaatcctatgttccacctattctcctcttccctctttcccctgcatctgttgatttttttttttttttttactctctgtagttttgccttttccagaatgtcatatagttgtaatcatacagtggcttttttcacttagtaatatgcatttgtgtttaagtttactccatgtcttttcatggctagagtatgcatttttgacttggtatgcaatactacagaagtaatactatgttcttttctaatcaggaggtacataatgtccatttgttctggtgaaggtaaatttgatcgtttgattaaggtgatgtataccagatttcttcactgtaaagttactactttttcctctgtaatgaaagtgttttgtgggaagatactttgacattatgtaacaaatgctgtttctcatcatagctttcagcaccaattttcaatattttgcctgaaacaattattactctgtttttgccaaatggtgattttttaataagatttttagtatagttaaatttttgtcttcttccatagcttttgtgtttttctgttctacttttctctaaggctttcctcactcaaaacattattaaaaattctcatgtttacttctctttttaaaaaactagtgataacatttcatgagcactttctaatgtttatgactttaagattgccagaaggaaaagatcactgaagaccacctaggttaacaaacagcttaaatttgaaaaaacaagtgaaagaagccaacgcatgttatcagttcataacattacctcccttctagaagaatagcttcttccattctctccagtttgcttccaatcttatagtggaaccagatcttctaaggccttagtaggaggtgacatcaagggctaaaaaaatactctttgatgaactcatgtcactttgatgctcagatataagtcagactgtgcagaagagaagctttaaagatccaagtgatttagaaactggagataagaaaagcaagcagaaaactgggaaatgttatttcagtcactgccaatatgggatgtggttccgtctgtttatttacataatatgatctagtgctgtgcacttattaactagactgcaaatacttgcagcttaataatgtgccgcatattttatcacatcctgaattataaatttgaataaaattgtaagaagatctgatatttgatttaccttttaaaccgtgtttcaacctgcaagtagtttgcaagttaaattgttaatctacttgctgcataaataaaattgggcagtattaggaaagatgcccagggccgctgtctgagaccaagtgtctgtcttttgtcttatgtaatttgtgtctgttgcgtacttcagcacttgaaaaactattcctctgtgaaaagaggcccttcagtgttgctaggaaacccaggaactgttttatatgatctcaagattttaattcatttctagtgcaacacagtgaagaggaattgaaggctttaaccattttttgaaagaaaaacaaaaaacaaaaaaatctaaaagtcattaaaaaatcgttttaaaatatcataagcagcatactcatttaaaaaaatctcagaataaagcagaaatggacagttgtcttccttaaaatcctaattctcaaaagtagttgctgttaacaatttgacatatatcttttcagattattttgttacacatatatgactattttaaggcagttttttaaaattactttttatgtatcaaacgagaaagaaagataatataaaaactaagttgtattttattttgatcactttgtatagtgtaagtactgagaacatgaatttgggggatttcaacttttacaaatgtaggtgtctaattgaagttatttaacatttttatttgatttctacaaaatgaaaactctaaaaacacacagtaacccggaagtttttattgttattgatagcaattttttattctcacttatatattcttagctccatatttgaactatttcttggtttgttttggaatgagatttttatttttaagggtacttagattactcatattatttgatgcatgatgtgttaataaccaaactaaatttctgaaattgatcaaatttataattcactcattaattcttttctattatgtgcaaagaactacagcaggagatagaggtagccgcaatttgcaatttatttcagccctaatagagctaatgatttaatagtaaatcagggcatgcattttaaaagttcgcaaaaatacaaggtaacatgggaagaagataagtttctcaacatctaggaagatgtgacaggccaggcacagtggctcaagcctgtaatcccagcactttgggaggcaaaggcaggaggattacttgagcctcaggagttagagaccagcctgggtaacatagtgagacctcatctcttaaaaaaataaaaaatagaacatgtgacacaactctggatgccacctaagtcagtttcaccataaaatttatagaggaaaaaaaattccaaggcaacatatgctaagtgccgagtaagtgataccgatggtagaaagtaaagtacaatcagcattcatagagaaagaaaaatcattgtagggtggagaggtagaaatgccttaatgaatgagataggaatggaactgagtttattagaaataatagagtgtatttaggttacacatttaggagaaacacttgagattatgtacataaataccaaatcatatcattttaaatagaaacatgggcatgaaatggaggccagagtagttggacttttgggctggatcagtgggtttggatgatgtctgatcaatatttgctgtataacaaaacaactcaaactctagaggcttaaaacaaaaatcatgtattcatgatcctgtgggttgctagttagactaggctaggatggaaaattatgggctcaacagtggggctgcagagagctggtctagactagggctgagtgttcgagggttggccagacacctccgttgccccctctgtggtttgttcacacagtggccggtgaccgaggaggcaagagtgggtgcagcaagggtttttgaggcctaacctcggaactacacaggtcattcctggcacatcctgttggtcaaagctgggcaggcctcaggtttaagggagcaggtgcagataatttgaatcccaatttaaatttatttcaggagtgcatttacatgtgattgaaagcttacgatggtgcctaaacgtaaatggtgttgaatgtaaccaggattttctttagttctcagtctattggctttgactttattaaaattttattagaactgatagtctgtgtatattaagcttattttaggactaatggaaagaatcatgcagtgactaactcctcttcattttggtttgttctgtcaaaatttatttgaaaaacaacatcaagatagtcatgtggagaattaggactttggattgatttactcctaattttgctctaatgtgtttttttttttttttttttttttttggtgggagcaggggaaaagggagaggaagagagaggcaggccccgtgaaccataccatatcttagtgcttagggcctcctccaggtcatcatccagctctgaaggttgtcagagtcaggtgacataggtccaaatagagttgctcttcaacagaaagtagtgaaacttaatggttatgcacactttagatgtttgaatttatacttaagaaaatgttgggtaatcacaagtaaaccatagatgtgacaaactagtgctatgcatacttttatagtatgaataggaaaaaaagttttatgtgattgttcacttacagactaaatttgcatttaattttttaattttttgagacagagtcttgctttgtcacccaggctggagggcagtggcacgatcttggctcactgcagcctctacctcccaagttcaagcgatcctcctgcctcagcctcctgagtagctgggattacaggtgcacaccaccacacccagctaggctaacttttgtatttttggtaaagatggggtttcaccatgttggtgaaattaagttatgtaattttaagacgtcttttataaaataaaataaatgtgattattggctttttcagaagggaaataaaaagggatgaacagtaagaagtgtctcaaaaataatatgagtcaactatttggttttttttgtttttttttttttttgagacagagtttcactgttattgcccaggctggaatgcaatggcacaatgtcggctcactgcaacctccgcctcccaggttcaagcagttcttctgcctcagcctcccaagtagctgggattatagtcatgtgccaccatacccagccaattttgtatttctagtagagatggggtttcaccatgttggtcaggctggtctcgaactcctgacttcagatgattcacctaccttggcctcctgaattgctgggattacaggcgtgagccaccgtgcctggctgtacatttttaaaagataagtaaattgacagtgttccttttctttttgaattatcctcatcaaaacttattgcttagaaatatttttaagcattcaatagaaggttatagaattaaatctaataaaaatttaaagaagccttagcagaaactgtgtcacagttgatcagcatataccctaccgacagtgacttagttccctgtgtgtttgtggtgagcatgaattaatgtagccttgaatttgtatgacatgactgaccgtattagtccattctcacaccgctatagagaaatacctaaaactgggtaatttataaagaaaagaggtttgattggctctgcaggctgtacagaaagcatggctggggaggcctcaggaaacttacaatcatggcagaaggcgaaggggaggcaggcacgtcccacgtggccagagcagagaagggggaggtgctgcacacttttaaacaaccagatctcctgagaactcactcactatcagcaagggggaaatccacccccatgatccagtcacctcccaccaggcctctcttccaacactggggattacagttcaacatgagatttgggcggggtcacaaatccaacctgtatcactcacctttcagagattctagccaaattcagttttaaacatctgcttgcatatagaaaccttctaccagtagaaacttacataatgtcaggaagttcacagcgttccttaagggaattgtatcaaataagatgatactacttgtgtcattctacttttacaaaggcacaaattaaaaactgggcatctcttgagtttggactccattcctcgggacccaaaccccgtcctgtatccctcgcatcaatgtgctgcttctgaatggctgcggggcactgtgtgggctgtcagcgtatagcaaatgcttagtcccttgtacatttctttctctagatttcgccagaagtttgagtatcactactcctgaagagatgattgaaaaagccaaaggggaaactgcctatctgccatgcaaatttacgcttagtcccgaagaccagggaccgctggacatcgagtggctgatatcaccagctgataatcagaaggtggatcaagtggtaagtttgatatgtccttgctcgcttagcagctgtctgtgcaactatctgatgtgtccatcaccttgccagtcacatggatgggctgcagggagctaggaaggaagccccccaacttctcaggctttatggtctgggtgaggaaggcaattgctctggtggaaattgaggacacatgtaatggagggaaatagataatgagtgtgacctaaggttacagaagagcaaaagatcactggagttcttagagacacttcagggaagaagaggaacttatgaaagttctgacaatctggatttgaggcggggaatagcagaggcctagatggagcaggcatgacgttgagacaggagtgtgtgttgtgttaggagatggcacataactgtgctttgttaaacgttagacagaattgaaatttttaagttttacccaaggattctgtcagcagtagaagtgtcattagctatggtgtaacaactacatagtattacagtctattttccttattttttcaagttaaatatcctgtccaatgaattttttaaaagacaaaatctttttaaatttattttttttactttgactttaaaacttcccagtgtaaaaatgaagtctttagagcaaaaaacaatctataaaatatttagtcttaaatttaaaaaatcttaaaacattgtttcagtattttttctaatcaaagtaataagagtctaatgtagaaaacttggaaagccaaaaatagcacagaggaggaaacatgcctaataatctcatctccaaatatatgtcatgttttaccttttcaatggttctagaatactttatttagaatgttgcatattggctttgtctgacacatttaattttttaaaaagttaataaattatattagatcagggagaggaaaataagtccaaatatttaggtaaatatagtaatatatatatttggaagagaaattttgtttttacttcatttgttcatgtaaaagaaggggatatttaaaagttacaagtaacatccttccatttaatggctgaatcagtgcagttaggtaattaatatttttggcaaacccagtcggtttgcccttgatgtttatgttaaggaaataattaaggtgctttcccaagttgtgagtgactagagccaccccctccaaagatgtaacctctgccctgattctgttaccagaacttctttctgtttccctgagcaaaataaatcgggcctgactcattttatctactcagcctcgttgccctgttccctgtcactcttacctcccccttctctcccttctctctctctggaggtgctggcacctagagtacaggctcctgtctgaggtcctgcagttccccgttcctgtgacagtgcagtgcctgtcccgctttagagcccaggactctgatcctgtgcgtaagataggggaagcctaggaaccatatggagagcgtgggtcttccgtgcttctgctgagtgaagcttgtgaccaggtgcatgtagagaccaagaagcactgtgccctgagccattagcgtgtctgttaatgagaagaagactccaagtcgtccatgctgagtgagaggcacggctttgccgtctacaggagttgtaagataaatgtgaaactgggacttgactctgagtgaccgtttctgggttaaaaacctagcttctaacctaaaacacagtcacatcagaccaaaagaaagaagggttaggaagagattgatgcagaagaggatgcatacatggaatttaaactacatatgttaacagagcccctattttaatatatttcagctagtagacagaatggttaaaaactaggaattggaggactgagctggaaaaatttgcattcttattccttatgtgatctctttagtcagcagttactgtaaacagcgtgcttgggcagtgttttgtatactttaattgtatatacttaagccttaaaacaacatagtaaggtgagaattattatacatatggcaaggaggaaacagaggcccagagattttcatgcccagagtaacaagtgcagttgggatttgaacccaggtccctctgactctcacagctgctctgttatcatttgcactgtcctctgctgcctcccgtgtttcataaacctgtttcctcatgtgtaaagtaggaacagctatacctagcatctcagggtcattacaagaattcagcaaaatactgtattcacacgcattctgtaagcttataaatgatattgaaatgataatcatgtactgtgccaagttaaatggatctggtctgcatctttgttgtgtgacttggcaaaagctgatcagtgagagccacttctttcctcagcctaaatgtcaatgtggacaatgccatcgtccttgcagggttgtgaaggggaatctgaagacatgtaaaatttcatggtaaatttcccattccttaactaatatttataacattgttttctgggaagacactaagctagcttataaaataaccaacagcgggaatgcatcttatttctcaagccccccttaaaggactactaaggtgtgtgtggagcataatgagctattggaagtataagagattgaactctacgacctttagagttagattccacaggcaaattatgataagccttttaatcaaaggaaattaatcaaaggaagatagagtagccagatttgtggagtagtcagtgttgcttttgacaagtgggtatgtcaagaagattgagcaaataaagtaatagcttgtgtttacagagtaagtcagctgtggacccgtcaactacttcttttatttacttagcaaactggtattgagcgcaacctagatgcacacagttcatatataaataaaagatctagctgggcacggtagctcatgcctgtagtcccagcactttgggaggccgaggcaggcggatcacaaggtcaggagttcgagaccaaccaggccaatgtggtgaaaccctgtctctactaaaaatacaaaaattagcagacgtggtggtgggcacttgtagtcccagctcctcgggaggctgaggcaggagaatcgctttaacccaggaggtggaggttgcattgagccaagatcgcaccactgcactcctgcctgggcgatagaacaagactgtctcaaaaaaaaaaaaaaaagatctttggtgggttggggtggggtcagtgtggttgggaaggagataatacagaagagaacccaagttcctccactcaagaagtttctgcagaataaacctggaaaacagtgttcttagatgacatttattctgattatactgcccataattagcactcaggtaaaagaaattaattgcaggatacaggccgtagttgtgtttcctgattattatttgagttttggcatcactgctctttggcccatgggtctcgtataaccagaatgaagagatttcattagcaaaaaagaaaaattataaaatgtgttaaattaatgttagagattgttagagatgactactacagttctcttccaagaaaatattccaaacatagattttattttccctctaaagcatccagcctttagtaattgccttcaaaggctatgtgtggttcagaaaactcagtgggttaggcacaggtctttgctttagttacagaagattcattcaaaggacttgttaacctgggtacacatatcttaagaggtttattttatgattttatctgttagagtctagagccctcaagtaactccaacttagtattaagaccaaacaaagttatctttttgttagattccacaggcaaattatgataagcctttgtaggggcagggggcagtaggtacttgattttgttacacttggttggcaaactacagcctcagaggcagttgaaaaatagagtatataagaatgagcaggccaggcatggtgactcacacctataatcacagcactttgggaagccaaggcgggtggatcccctgaggtcagaagttcgagaccagcctggccaacgtggtgaaatcccttgtctactaaaaatacaaaaattagctggctgtggtggcacgtgcctgaagtctcagctactggggaggcagaggcgagagaattgcttgaacccgggaggtggagggagccgagatctcaccattgcactccagcctgggccacagacacagactccacctcaaaaagaaaagaaaaggaaaagaaaagacaacgaacaagcaaatctgtgttcttgcccaatcttactaaattgctctctaggacagtatagggctttactattttatcatgttgcgtcttggtttccccattaaaaatagaagtctgggactatacccaaggatcacattgattcctttccattttctcgttctgtggtttgggtagttttatgtttccccataatactgtgttcttctttttcttttctgggagggggcgttctgtagcagcaggtgtatccagggctcctttaagagacagttttttttgtgtgtgtttgtttttcctcctgtctaattttggctttcttttagattattttatattctggagacaaaatttatgatgactactatccagatctgaaaggccgagtacattttacgagtaatgatctcaaatctggtgatgcatcaataaatgtaacgaatttacaactgtcagatattggcacatatcagtgcaaagtgaaaaaagctcctggtgttgcaaataagaagattcatctggtagttcttggtaagttatttttatttgtgttaacgggttactgagtaagagaatgattagtcatagtactgtagtagcagcacttgtataaaataaagcttaattttttagaataacaattttaaacacttgaagtacttctatgttggatagcatcaaatataaaactagcttttggttttggataggaaaagtaagaagtgatcaacttctttgtgaaattcataagagtttgaaaataagtgaacgagtattatggtatggaggaagaaccctaagctaggagttaggagatctagggtttttgccttgtcctcagaatttgccctgagaattatgtagaaccatgtttctatgatgaataatttaagcatttagaatggagatgaagaaatatggaagaaggaatattgaattcaagtaaggccattaggcatcacatagtatttaagcttcttggcatcactgtttttcatcattaaagtgaggagatgagacattcactgatatcttatagccctctctgtaatagttaatagggaggtagtgtaaactgctttgtaaactgccaaagactacagagtttattatccttctctagattctgtgataatgtctacaagcactcttaatcccttcaaattgagaaactgaaagataatagttcataaatatacttctaaaaccatactgtggtaagctttacacaaaatgtacattggctaccatgtagaaaaacatagctgtctagctctctgcttaatgacagtaaattcccctgtcctcatgttttaggggacacttggggattgactttcataggaaaagctgatgctagaattgtctagcatgactggaaataactgatcagggcaggcctcccacatcaacatttacctcattccttctgtttagagaactgattaggggtggggtagaatattctaaagaatactctttattttaattttaatttaatttaatattattttatttgagatggagtcacactctgttacccaggctagagtgcagtggcacaatctctgctcactacagcctctgcttcccaggttcaagtgattctcttgcctcagcctcccaagtagctgggattacaggcatgcaccaccacgcctggctaatttttgtatgtttagtagaaacagtgtttcaccatgttggccaggctggtctcaaactcctgacctcaggtgatccacccacctcggccacccagagtgctgagattacaagaatactctttaggagagcaatgttcaagatgacttgggcacccaacacttaactactcctcctacaagtagacccagcacttaactattactcctagagactaggaacaagagtggggatttttgtgtaccttcatggcaaattcatgcattgtcttggtagatagactctgctggcagcatcattgaatggggacctgaagaggtcctggtgaaatgcatcattctgaatcgcactaactaaaaatgtttcttgtggtgtgaaagtaagtcaatctaaaaaaggaaccaggaaaaggaatatggtaatgttggaaatttgaattttctgtgtcttcattgagtaaacatggagtaacttttctttgttataaatgtataagcaagtgaaagattaacacctggtccgaattctttttttttttttttttttctttttgagaccaagtctcgctctgtcacccaggctggagtgcagtggcatgatctcggctcacggcaacctccgcctcctgggttcaagcaatactcttgtcttgccgtcctgattagttgggactacaggtgcccgccaccacacctggctgattttatttttggtagagacggggtttcaccatgttagccaggatggtctcaatctccagacctcgtgatctgcctgccttggcctcccaaagtgctgggattacaggtgtgagccaccgcacccagctacctggtctgaattcttatcacagacccaggaattcctgagattataaccctgactatactttcttccaacactgctctctaggaactattaagttggaagatgtatacggaatattaactggttcatgatatgcgaagcagaagatatttgattatcggaattatttattgtgaaacccctgtttgatgggacagttacactgggattaatggggttggcacatattcccagaagagttgtggacaagcatgtttgtgtgtttgtgtattgtctggatcctgtgggaccaggttcagggtcacatttgcagttctcaactgaagagaacattacagcagaacatgtcccaaaaaggaacctgagttgggtggtaggggatggcacatgatgtggctcagttcactcatggcaggagccgtgactgcccggcagtaggaatggcctttttatattaaactttgaaccccagcatgtcctaagaatgggtaagtgggaagcattgacacagttcaccctgagttactcctggggagaattttatagccaagtcagccttcagttcaaaccaaggagggggagaggggataaactggggatgagaggagaaagcagggaagtgattgccgaagagaagtagggacgactggaactctgatctggacgaggttgtgtcagagccagagaattccttgtagctttttcttccatgtttttagatgagtcgtgactgctgctgggagaaaccaccagaattatattctctcgaaggtgaaaattaattggattgaagcttatctgttagttttgcctggaaattctgcctggattatctggggcaaaagataagatgaagtgccctctagtgacccaactaagtggtggtcactggagctcatttgattgactgatagtggctctgtctaatgctttggttcttttgtgggaaatctgaagtagttgccatcatggcattcacagggtaatggcagtgcattcattgagcttgtgtgttatgtggccgttaacccacagagatgattgatagtcgtctggatgtgaggggcagcatgttgctgtagcttgctccattgccgtgcctgccttgctctttcagacacagcagaagctcttgtggatgcagctcagtaaagaagcagaagtgggaaatgataacaaagagagttgatagaaggttactgttgtggccatatatcacgggcaccttcccctggagctctggaagggcctgtttattgaaaccttttggtataaagagacagagttgttttgaagagcagaacatgcacagttaacaattcctggacatatatggtatactcccactgcaccatgccacagtggcagcagcaagtgtagtggctcagtcatcactggccttaaaggtcctaagggatttgcaaaccattgatactgggcacggcccctcactactttttattttacaataatttttagttttatggaaaagttgcaaaaatacaaggaagtttctgagagtggatccatcatctaatttcccctaatgttaacatcttacaaaatcatattataattatcaaaaccaggaaattaacactgatacaatactattaactaaattacagacccagtttgaattttactgttttccggtaatgtcctttttgtactaggattgcatctagaatccacatggcatttatatctccttaatctcctccagtcacgtctgggggcacatgatgtcatgtcttattgttaatcgtgatcgcttggtttaagttttatctgatgggcttctccactctagagttattatttttccctctataattaaaaaatgtcttgggggagctacttcgagactatgcagatatgttatttcttatttaacttttgcctattgattttagcatctattgatagattttgcctggagtcagggtatttttgaaccaataagaaattatatttcttggaaggatgacatcatgataaaagtatcccctgtctcatgtagggatttagagattatttccagtagactggtgcagccactagcaggaaaagatgatgaaggaatacgtgtatggaacagagcattactaaattggtgggataccatgtccaactacaacttgatggtcacatacccatatctgagaaggactgttgtttgtgttagtgatcatggaagcagatgttctgaggacagcggccagtatgtgggaagtccagaccaaagaaacatttaggagacaagactttattcgtgctctctttgtggttttcttctgttccagcagagtaccatgggttaagaattaatcttcctcgtagtgtaatggttggatgttggcatgtaaaagacttgtacttcctcttcccagtggaaagcaggtgggccactccaaagtgtcattcagaaacctgtgttggtagaatcttgttttattgtggacgggttgtagtgaggccctgaatttcctagcagctattttaaataactatccgttattagatatgtttagattgctggttatatgggagaaaatggatatagaaaggatgagcgttagagttagaataccatattacccatagatgtttgatgcacaaagcattgcatcagttatttatttgctggtaatttattctaataaaggatttattggtagtttgaagaactggaagagaacaaggctcatttcattgaagactcccagaatgaaataatttgcaaaacttatttaaaagtccaattgatgtagtctccagagcacctggtcagattgaaaaataaacagatttgtttggaaaaatcaacagtgcagttaaatatgtgttgacccttattttaaaaatgtaagtaggagcagatgaaggggaatacaattaaatttgttaaggagttactaagaaagagtaaggtcatggttgataaccttagttgaagataccccactgaatatgataaatcatgttgagccagttttgggaaacaatttgacaatttcttacagtgttaaaatatgtacagtcaccatatgatccagcagttactaagacaaaggaaagcatacgccagtgttcacatgagtgttcaagcagcattattcataatactgcaaaacaaaaatgcatttacctttattcatagtagtgaaagaataaaaacccattcacgactgaaaaaatgaaaatcagcttaaactaaaaaagaaaaaagtcttgacgtttatcagccggaaggacagatacagattaaagtcagccacagagtttatagaaaacattgtctctcccaaggttatagagtagtagtaaagcatagactattgctgtcttttctagtgttgcccgcagacccacatttctctacccatcctttactggaatactcaattactaaatggccccacctcctcacagctcccacttcctgtttaatcctcatttttcctaatctcagaaacagctgattgacagctgatggctacttccttacaacctcctgagaatccttcagcatccctgctcttgtccagtggcattccgtggttcctcgtaatgccgtcctcactagtcaatctgattttgatagaccacacacttgctccttgtcagtttggctgactgggctttgacagtagccccaaactggaaacacagtattcattaacaggtgactggataagcaaacttgtgttatagtccattgaaatactaaaataactatatatacaataacggctcaatctcagaaatgttatgctgaataaaagaagacaagaaaatacatactgtagtattctattcatgtggttccagaagaagagctaatctacagtggtagaatctgatcagtggcttcctgggtccagggttttggagtcccatctattgtaaccagcatgagggaacttccttgggagagggttggagtggtgcttaatggatatagacacatttattaaaagtgatcagcccacgtgattaacatgttaactttattgtgtgaatattataccttattaaagttcagcagaagagtatgcaatgccaaggtgttaatccaggattggggtgagttgcaggtaatggagttagtagttgttctaaacagttacccagaaacacctggaatataacctcagatttcctttttttttttttaattaaatattcttttttacacatgaatttccaggctgtgaatatctttttgattcagggtctggttctgtcacctaggctggagtgcagtgacatgatcaaagcttcactgcagcctcaaaatcctggtctcaagtcatcctcctaccccagcctcccaagtagctacgaccacaggcacacatcaccacacccagctaatttttcgaagtttttattatgacagagtctcgctatgttacccaggctggtctcaaacccctgacctcaagtgatccccccactgtcttggcctccaaagtgctgagattacactatgcccagcccaggttttcttttttgtagcctgctctttggatggatttgaggtgatgtaaatgcagaatgctagttgttccttgccacactaagtgttgttagtattgttgatgataaactgcctgattgtcagggttatggcgcctagagggatgtgacttggtacatactgccagagggttacatgtcaggcatggggaagaatagctaaggaatgggagggggagcttccttgactctcaagtggtcttgctgaaaaaagcaagtgcatcattcttgctttttttcaggtgtgccccatgaaatggacaggcaccgagctatgcctgagatattgccatatctactaatgcagtggctgcttgtctgagcttattctttgctgttttgtgtcagataaagctgaataaactgatgttgatcacttactgtggtctttcattcttttgtgaattctgaacccagaaccaactgataatgagtcagtggttgtgtacaatgctgtattcataaaagtaagttccattctcttatgtaaatttataatttgttttctctttcagttaagccttcaggtgcgagatgttacgttgatggatctgaagaaattggaagtgactttaagataaaatgtgaaccaaaagaaggttcacttccattacagtatgagtggcaaaaattgtctgactcacagaaaatgcccacttcatggttagcaggtactgctgataatagtatttgtaccacatgccattgatttggactaagatctagtaggggtgtgtgtgtgatttgagatagggccttgctctgtcacccaggctcactgcaatcacggctcactgaagcttcaacctcctaggctcaagtcatcctcccacctcagcctcccagttagctggaactacaggtgcatgccatcacaccctgctaattttttttttaaaaaatgtgtagagacaggatctccctgcgttgcctgtgctggtctcaaactcctgggctcaaggagtcctctttccttggcctcccaaagtgctgggattacaggcatgagcccaggcatgtgcccagcctgcttgtatattgtagattcccagatgctttctttcccttttctacatagaataatcaggatttccataggaattattcagtgttttataatatcaatttagtgtcatatattataaatgaagagctattctatgatttcatttttttaggatattagttactttggtacttttttttgggttttttttttttttttttttttccgagacaaggggtctcgctctgtcacccaggctgggcgtgcagtggtagaatctcggctccctgcagtcttcacctcccaggcttaagtgagcctcccacttcagcctcccgagtagctgagactacaggcatgtgtcaccacaccctgctaatttttgtattttttgtagacatggagtttctgcatgttgcccacactggtctcaaactcctgggctcaagctctccacccacctcagcctcccaaagtataggtgtgggccattgcgcctggcgaattttttttttttaattgatgagacatgttcatgattacaacttagatggtggctaaagtatagtaagagttggctctttagtgttttgcctagattgaaaatatagtaatttacccatggtgtgtctgtaaattaaaagaaaacccgtgtgacactaactagaaagttacaaattggccaaatctgctcacctatttgttataattgacttcttagttcaaactgatgaccaggctccaccccgccatccactgcatcctggtctttagtaggttttctctctgcctctctgtttttcaaactaagagaccaatctgggagtcctcttctgacttccttttgtatgtttcttccatctaggggggaataaaataggttttgtatgttttcctgctgcaggaaagatcctttgtggaatgcggtagcgtttatagtcttatgtgccccaagatgggtttgcagcaggtacacagtggaccagcacccctgctccagctgaggctgtgtgctgcaggggatcatggttactttcaccttgatacatgtgaactggaagcatgattgaattctggaaacatctgtgtggctcaatgccagtttgcttgcatccagccttggtctgtcttgcttttaactggattgtttaatttggagaggactatgtttactaacacctgataacaatacatactataaaaatgagtttgttttctttttcctccttccatagaaatgacttcatctgttatatctgtaaaaaatgcctcttctgagtactctgggacatacagctgtacagtcagaaacagagtgggctctgatcagtgcctgttgcgtctaaacgttgtccctcgtaagttatcttctttctgttggtggttttgtttctgttatctttataccacctcctttagttcagtcagcaagtgtgtattaaggacaaagggacactgactttgatcagaacactgtggtttgattattagcttttctagaaaaatacattttattaaaaaaacttcataattgcaatgatatattaagaaggtaagagttgtcaaatcaacccttgtaccatatttagctgttataagtatgagtagcttagaacattcttatatgttaaccaagatagctttgaatattaaaatctttcagacaggttttatcattttaatgcttggaatagattatacagttcagaagacagttctttttatgaatttttcccccggatcaaaaagactaaataatttgtcttaaagttaacacgtgatgaaatcaatctaaaaatgtatagcctaccttcagtatctatacatgtatatatgtatatattttttactattaattcttcttattttagcttcaaataaagctggactaattgcaggagccattataggaactttgcttgctctagcgctcattggtcttatcatcttttgctgtcgtaaaaagcgcagagaagaaaaatatgaaaaggaagttcatcacgatatcaggtaattaagtgagacaggagttgactgatgtataccaaatatatgtcatttctctaaagcattcgttctcttattaaccacccaaagcatctttcttaggagaatgggtaaaagctctggccgccttctcaatacatttgaaagcatttacttctaactgcaagtgcagagctccaaccaccattcgttgtgccccgctccccaaccttctcgtaccccattttaagaaccactgccaaatgattatctcaagactgcctgcttcttgagaagaatccctgcctgcagtggtagggatgaagtagatattgaggtttgaaaaaaaaactgacctgattgtatcaagtaatctggaagtttgtagaacaattggtagtataatttttattttccttaaatattctaaatcagtaggtcttaacgagaagtgtgcatattagataatagaattttagaagtaataacacatgacttcacaccctagaaattgacatttggcaggtctagggtggggtctggacacttgtacaggcacacttcagagttatcgcacactgcgataaatcacatgaatgtttttgtttttccagtgcataaaaggttatgtttatactatattgtagtctaaaatgtgcagtagcattatgtgtaaaaaaacagtgtagataccccaattaaaaaatattgctaaaaaatgctaatgattatctgagccctcagtgagtcttaatctctctgctggtggaaggtcatgcctcactgttgatgactggtggctgatcaggatggtagttgctgaaggttgcagtggctatggcaatttctttctttggttgttgggttttttgttgtttgttttctgagacaaggtctcgctctctgttgcccaggctggagtggagtgatacaattatggcccactgcaacctctgccccctgggttcaagtgatcctcccacctcagctttccgagtatctgggactacaggcataagccaccacacctgactaattcttgtattttttgtagagatggggtttcaccatgttgccaagggtggtctcgaactcctgggctgcattggctcctgccaagatgtcaacctgtcctttaaagctttgaagccagacattgacatctttagccactaaaggcctagatggtgtcttcttccagtagaagtctgttttgtctctattgaaaatctgttacttagtgtagttaccttcatcaacgatcttttaactagatcttctggataactttctgtagcttcttcatcagcactttgttgcttcactttgtatttttatgttatggaaatggcctttttccctaaactcattaaccagcctctgttagcttccaacttttcttctgcagctgccttagctctctcagccttgatagaattgaatagagttagggccttgctctggattgggctttggtgtaagggaatgttgtgactattttgatcctctatccagaccactaaactttctccatatcagcaataagactgcttcactttcttatcgttcacgtgttcactggagtaacactttgactttactttaagaactttttctttgcatttacaatttggtttggctgtttggtgcaagatactagctttcaaccagtgttggttttcaacatgctgtcctcactaaggttaattatttctgggttttgatttaaagagagccttgctgatgattgcttgactccaggagtttgagcttgcagtgagctaggatcgcaccactgcaccctaccgtggttgacagtctcaaaataaataagatatttttttaaaaagtagagccatgataactattccttttacttgaacacttagaggtcattgtagggttattaagtggcctaatttcaatatcattgtgtctcagggaatagggaggcctgagggaggggtgagagatggggaggatgttgggggggatggccagaacacacacaacatttattaagtttgctgtctcttatgggcatcattcatggtgccccaaaacagttaaaatagtaacatcaaagatcactgatcacagatcaccctaacaggtatgattatgagaaagtttgaactgttgtgagaatttccaaaatgcaacacagacatgaagtgagcacatgctgttggaaaaatggtactggtggccgggcacggtggctcacacctgtaatcccagcacttagggaggccgatatgggtggatcacgaggtcaggagatagagaccatcctggctaacacggtgaaaccccgtctctactaaaaatacaaaaaattagccgggtgcagtggcgggcgcctgtagtcccagccactcgggaggctgaggcaagagaatggcgtgaacccgggaggtggagcttgcagtgagctgagatcacgccactgcactccagcctgggcaacagagcaagactctgtctcaaaaaaaaaaaaaaaaaaaaaggtattgatacatttgcttgacacaaggttaccacaaaccttcaatttgtaaagaaaaaacaaaacaaaacaaaaatgcagtaagtatctatgaagtgtaataaaagcaaggcacaatgaaacgagtatggctgtattttttaaatgcaccaaagataactcatatacatagttattcttcggtatccatggaggacctcctgcagataccaaaatccaaggatgctcaagtccctgatataaaatggcggccaggcgcagtgactcacgcctgtaatcccagcactttgggaggcggagatgggaggatcatttgagcccaggagttcaagacaccaacctgagcaagatgtctctattaaaaaaaaaaaaaggaaaaagaaaaagatacaatgtatataacctgcacacattcttctgtatacttcgagtcatctctagattacttataatacctaatataatgtaaatactatgtaaataattgttataatgtattgtttagggaataatgacaagaaaaaagctgtacatgttaggtattttaaaaatattaaaacaaaattttctatacatggtttgttggcttcacagatgtggaacccgtggatgtggagggccagttgagctctctgtcagtgtttggtatgaaaattcttatgcctaaattcccagcaaacttaaatctgtagtgttttcagctaaggttttagataactttaatataaaaagaattttttcttttccttttttaaaaaattttaaaatttattatttatttctctttttttgagacagagtctcactctggcgcccaggctggagtgctgtggcgcaatcttggctcactgcaactttggcctcctgggttcaagcgattctcctgcctcagcctcccgagtagctgggattacaggcacctgccaccaagcccggctaatttttgtatttttagtagagatggggttttgccatattggccaggctagtcttgaactcctgatctcaagtgatctgcccacctcagcttcccaaagtgctgggattacaggtgtgattaagatagaaatatacctgtaggtgttagtgttttctcaactataaagtgttacatggctttaactagattgtcttgaccagtgatactagaatatgaaactatttgagatttgtgttttgtaagacaacattctagaatcatctacatttgtgtaaataccatatttcattaagtgtgaagttataactctttaatcagaatgacagattggagacatacacaatttatgacgttatggcttgtgctttttgcttttttgtgacacacacacacacacacacacacacacacacttttatatgtttagtacctaaatacaggctcttatccatgattcatagcttgcataattgtaggtttttagaaacttattctcttgacatgtattggggattttgctttgcagggaagatgtgccacctccaaagagccgtacgtccactgccagaagctacatcggcagtaatcattcatccctggggtccatgtctccttccaacatggaaggatattccaagactcagtataaccaagtaccaagtgaagactttgaacgcactcctcagagtccgactctcccacctgctaaggtagctgcccctaatctaagtcgaatgggtgcgattcctgtgatgattccagcacagagcaaggatgggtctatagtatagagcctccatatgtctcatctgtgctctccgtgttcctttcctttttttgatatatgaaaacctattctggtctaaattgtgttactagcctcaaaatacatcaaaaaataagttaatcaggaactgtacggaatatatttttaaaaatttttgtttggttatatcgaaatagttacaggcactaaagttagtaaagaaaagtttaccatctgaaaaagctggattttctttaagaggttgattataaagttttctaaatttatcagtacctaagtaagatgtagcgctttgaatatgaaatcataggtgaagacatgggtgaacttacttgcataccaagttgatacttgaataaccatctgaaagtggtacttgatcatttttaccattatttttaggatgtgtatttcatttatttatggcccaccagtctcccccaaattagtacagaaatatccatgacaaaattacttacgtatgtttgtacttggttttacagctcctttgaaaactctgtgtttggaatatctctaaaaacatagaaaacactacagtggtttagaaattactaattttacttctaagtcattcataaaccttgtctatgaaatgacttcttaaatatttagttgatagactgctacaggtaatagggacttagcaagctcttttatatgctaaaggagcatctatcagattaagttagaacatttgctgtcagccacatattgagatgacactaggtgcaatagcagggatagattttgttggtgagtagtctcatgccttgagatctgtggtggtcttcaaaatggtggccagccagatcaaggatgtagtatctcatagttcccaggtgatatttttcttattagaaaaatattataactcatttgttgtttgacacttatagattgaaatttcctaatttattctaaattttaagtggttctttggttccagtgctttatgttgttgttgtttttggatggtgttacatattatatgttctagaaacatgtaatcctaaatttaccctcttgaatataatccctggatgatattttttatcataaatgcagaataatcaaatacattttaagcaagttaagtgtcctccatcaattctgtattccagacttgggaggatgtacagttgctgttgtgtgatcaaacatgtctctgtgtagttccagcaaatcaagctgagctttgaaaaagtttgtcttagttttgtgaaggtgatttattcttaaaaaaaaaaaagaaagaaaaagaaaaaaagataagaaggaggagtaaagggactactcctccttgccaaatgtgctaaatatcattttaggagaagaaagtgggtttattgtatttcccttaagattgtgagggagtgtggatacagtagaatgagccaacagtttctttataataaatacggtctgcaataaattatttcactagctctaaaacctttccctagattttagtagggagttggtttctgttaatatctttgggtgctgtggtggtaaatgctatattatgaacggtggcatgtatttacagttagagtattgtgtgtacactttttaatggtaaacttaagctgaatgtgtaatggatttgtgtatagttttacatatttggaagcattttaaaaacaggttttaaccttatgtaaaattacttttatactcgtgttaacattttcatctgtgccttttggtaatttaatttctattatgaatttctggtgcctatgagctagctatcacctacctgaaaggtgcttagaggtgaaggtactgtttctaaaaacacatcactgtgatacctttctatcctcacattttcaagcttgcctcttttctgttctttgtggatataacttaagcaattgtgttattcataaaggtttagaaatttcaatattcccaacactctatgtttctgattttataacagtagccatttttgaaagtcagatgtttggcctgttttatatgaataaagtttatttataaaatattataaaaaataagtaaataaacagaacattaataataaagttttggttcttcctattcctgactttcatataatgaaaattatcctattgatctaagtagaagttatcatagaaagtggacacgtataagactttccttcctttttttttttaataacatatgaggaacaagacttctcttcccatatacttcatattttagaggacattgttttaaaggcttatgtctcactgtaaaattctgtcagccaaatagtaccaatacgttttcaagtagttctcactgataatttagttgaaccagagatcaaatatttgctcccgaattactactggtaatcaagtagttgaacaaaaaattactaaagcatttccgttagatcagtcaaggacagtactgcatctttttttttttttttttttttaagacggagtctcggtctgtcacccaggctggagtgcagtggcgggatctcggctcactgcaagctccgcctcccaggttcacgccattctcctgcctcagcctcccgagcagctgggactacaggctcccatcaccacgctcggctaagtttttgtaattttagtagagacagggtttcaccgtgttagccaggatggtctcgatctcctgacctcgtgatctgcctgcctcggcctcccaaagtgctgggattacaggcgtgaaccactgcacccggcccagtactgcatcttaacagcaaagccattttattctactttataactgagagacttgataccatccatctctttaggttacagaggataatttgaagagaaatgttactgtagaatatatagttctgtactttttttttttttttttaagagatagggtttcactattgctcaggctggtctcaaactgctgggctcaggagatcctcctgccttggcctcccaaattgctgggattacaggtgtgagccgcagcatccagccagttctgtactttgaatatggagtagtttacagctatttttttttcttactggtaatcttaactaatatgattcccttgttagagagcctctcactcccccacccccaaaaatgtctactattcatgacagtaaccaattattctggacaaattgcttctttttaatttgagctatctgccatggactttctaaaatggaaacacagcctgagtgtatcttagggagagtttgattgaaaaaatccaaatcactatccatatagatcatggatataaagagatacctgatttttattaaaaagatactttttcaaatttaagagttaatcttggaaatttggaacaagtaaaggggcaagtaaaccttttgatgaaatataaaaggaactcattgcatgaagttgactatcaaattctgtgatgtgtggcttcttaaaaatattctcagtgtcttttgtgtgcgtgcagcatgtacatttgatgttatgtgaatgttgagttttttcttctaattttcacttcagcagtgtttagggctttcagatgccttattccagtgtgaacagaaaaagttcatattttatgtggttaatgctttgatgtgtcacataaagagtagtttgtagaaaatgttggcacaattttaacttcttagtggcttgtgacattatatattatatatatatatgtacatatatctttataacattcctgtgtttagtagtgtaaatgttctgggcaagttttaatattttgaatgcctttggatattccagcaataaaggcatcatgttctgcaataggatttcttactcatttacctattttaacactaaaatagaccacaactgagcacaaattccttttataaatgttatagaagcagggaagaataataaacacatttgtgaattgtggttcagtttatttatctttagggaaggctgatcatttatcttatagcagataaccccagcctcttattcattatggttaacttttataatttatcttattttataatttaagaatatagtacatatcagttgggtttggttttggtcatcgagactaaaagctccatcaaaacagaactttgtgttttctgctaacttatttaatgacacaagttttaagagaaccacaattcattgattcacttattcttttccctaattgtgaattttagtgataaatacacctgtactactgaggaaaatattctgacacttcacgtgtgcaaagtatagaactgacagtgtcagtttcagattttgtatgtacgatttctggcttatatatccaatggtgcagattttgaaatttgtaagaacaaaatttgttaagaaaaacaacttgctctagttttgtgaccttgtgtacttttgaaataaaatcaagaaagcagttctctgcctcatggtgtggctttattgtgccttttatacagtgtccactaaagctttaatattttattcctccctgcttgctgtgtcatggtttccttccccccgtgtatcctctaaacagaaagaataaagattgcgacaatcatattaatacatcattgaaaacatgtcaagcatacagaccattatctccccattcctgtgtgcttatataacagtatatactatttggggttgaaacctccaacgttctgtgatcatttcagaatttacagtataaactcaaacatttttcagatacattgcccaatgtgtgtatatatacacagatatgaggatgggaagtcaaagatcaaggcactggcagatttggtgtctggtgagagcttaccttctgtttcaaagatggggcctcttgctgtattctcacatgacagaaaggaggaaagggagcttcctctagcctctttcataaggccattaatgctattcatgagagtggagtcctcctgacttgatcacttcccagaggggccccacatctgagtgctatcacgttgagtattaagatttcagcataatggtgagatttgggcttctggctaataaaatgtatatcaacatgagaattttagggaggcacagatattcgaaccaaagtaacatctcgttatggcttaaagtattttcattcactgtaaatgttgatttcaggaaaaaccagaatgggatgttgatgctactttaagaagcatgttgaggaatattgtgtttatactagggtttctcaaccagcactattaacattttgggctggataattctttgtcgtaggggactgtcctgtgcattgcgaaatgtttggcagcacccctggcttccacccgctggatatcagtagcaccctggtccccgccaccacagcatccccaccacagttgtgacaataaaaagtatttccaaacattaccaaatatctcccctggggtcggagccaaatcgcctccttttgagaaccacggatttatactgatgtgaaattttctactcggcgattaaaaggtgaagagcacagggcttagagtcaggcatgtttaaataccacttattactagttgcttcactttgcttcagtttcctagtgcttaaaatggtacaaaatacctacttcacaggggatgttggaggatttcaaagagatagaactgatataataatgaaagttctttgtatttatccttgatagctgggatgctgataatgatacagactttcaaggaatcgagattacagtacaatatgccaagtggaactgagaataattaaatgcctttcatttagaccatattttaatcttatagctctaatggctggatcatatttctgcttaacaaatggcaaagctgattaaactgagacaacattgggtatgaagtaacttattattcagtaaaaatagtgtaagtctaaggcataatcaaagataatttcaagatgcagtaataccaacagtgaaaaaatcaagaagctactccaagaaactaagctcagtttttctgccggtatttccaaaatgtaagtcaaacatactttgttacttagatgatttttaaattgtgttaaatatttatagggggaaaagttgctactctaaggtaactatacaaaaagaagctattaggttttccaaatttgggatacttctgtgccctcctcagtgtcaacacaggtcttttatggcacaaaacctttgcattctaattgtttcgcatgcttgatatacctccttcagtaacctgaaggtgatttacccacctcagtccccactgcctaagtctatgacttccaaattgctcagtaaatgctgagtggatatttagtaagaaacctatggacactggggacaaatatgtgttcattaaatatgcatcatatactctgcaagccacctggcctggtctcttcaaaaaggcagtattggccaggttgggtggctcacgcctgtaatcccagcactttgggacgccaaggcaggcggatcacttgaggtcaggagttcgagaccagcctggccaacatgatgaaaccccatctctactaaaaatacaaaaaaaaaaaaaattaggcaggcgtggtggtgcatgcctgtaatcctaactatctgggaggctgaatgggatgattgcttgaacctgggaggcagaggttgcagtgagccgagatcgcgccactgcacactccagcctgggtgacagggtgagactccgtctcaaaaaaaaaaaaggggcagtatcatgagaaaaaggatgagtatgtgcagtgaggggaaaggctgcacttggcttaaagagttaacttgcgcaaatacagcatggggttacctgactcagtagtagcgaacacggaaaacagaactcattgtaagaagcatttcagaaatatatttctaaagcccttcttacggattcccgctgaataggtctagggtgaaatcagtgactcttctctcccagattatttcaataattaaccaacttagggagcctctgggtgcttaggaaaccctttgcagatgactgatttccatgctgaggcactaactaacgttgttttttttcccctgggcttcacaaaattgcagacttttagtgtggttgaaaaaaaaaatacctgcttaaaatttgttgtttaattttggtatactaataatatatcttagtatcagaatttgaggtgatctgcgaaaataccgaaaacaatttcttagaagattttagctttccaaaagacctgaagagtattccgtcaaagtctttttaaatggctagtcttctgaaatgcctagtcatttacaagtcatttctatgtgtgattgtattagctgtaacaaatggctacaaattgcttgaagaacagaaatgtgttatagttctggaggtggaagtccaaaatcaaggtattggcaagattggttccttctgagggctgtgagggaaggatctgctccagacccctgtctttggcttgtaggtgaccattttctccatctctcttccctctatgcatgtctaccaccgtgtgtacatttccatttttttaaggacaccagtcactgaattaggacctacccatataagcgcatctcaactaattgcgtctgtagcaaatctgtttccaaacaaggtcacattctgagattctagggaatctgagacttcaacatagaggtgtcccatagaggatggggacacctcaacccgtaacagtaatgatgactgcacattatgagagggactaataagatagtgtgcattggtataaaacatgtacccagagggttctctgtttaactttcaatggcataataacagtatcaacacctaaataactatgccaacatagttatttcatgatcctcaactgcctctgcctaccccaggaatatactatctttatttcaaatatgggtgactttgttaacttcacatctgcttgtcaagtgaaaaagtagttgaaacggttatgaggctgggcacggtggctcacacctgtaatctctgcactttgggaggccgaggcaagtggatcacttgaggccagcagttcgagaccagcctgaccaatgtggtgaaaccccatctctactaaaaatacaaaaattagctgggtggtggcacatgcctgtaatcccagttactcgggaggctgaggcaagagaattgcttgaacccaggaggcggaggctgcagtgagccgagattgtgcctctgcactccagcctgggcaacagagcagaccctgtaaaaaagaaaaaaattcataatctgaatttgtctttttaagtgaatcctgctgacaagataaaactagtttttgagggaagtaaagcttagaggaacttctacatttcacacttgatcttagccaaaaggccaggaagtgataagaacttctacattttaagttattcacaagataactattaatgaacctgaaatagtttgtaaagtatttcagaaaggtgatgcacaaagtatagagtgaaatctaaccctctcacccgtatttcccagtttctgtccccacttccccttcaaaaggcattaactgattgcttcttcaattttgataatttttgaataggtcatctatttcacagaagaaaattcaaaaggtctgagtatatagtgaaaaatgtgatcagttttttatttacccttctaggaatgctctatacatagtccagtacttgtgtatgtgtgtttgtgagtttatcctgaatattttattttaaaaagttaacagtgaatggattggtcatgatgggtgagtggatattaggtttttggttggagtaactgtgtgggaaattatgatactaagctaggaaagacagaaggattagcaaatttgaaagcagaaccctgttttagccatgcaacatataaaatgtctattagaatccaggcatgatgataggaggcaggtgaattaccaacttggacctaagtagaaaattcagaaatggagagaaaattggacagttttaagccttaaggcagattttagacaggaatagatgaagtcatcatggtagagaatgcagacagaagtaaaggtagtgatcagagcgctaattctttgaatgttcagaagtgaagctaaggaaatcagttttgaacatgttgagtttgagaagtttgttagatatgcaaatggagatgttgaatagatacctagatgtatctggagtaggagagaggactggagatagaaaaatgtggattaccaaggatgtgtgtgatataaacaagtgcccaaactatgggcacttcactcaaataggaagtagggaaatggaaaaatatggaatatatatatattacatatatacacacacatacatacatacatacatacatacatacatacatacatacatacatacataagggttgatatttaggggtccaatgctgtcagccagtgagaaagataatattcctggcaaccttgaatgaagtgtctcattctatctgctgctgctcctgttgggaaggcttttctgttttttgttttgtttggttttgtttggttttgttgagacagggtcttgctctattgcccaggtcggagtgcagtggtgcgattatagctcactgcagcctcgatcttctttgctcagcaatactcctgcctcagcctctcaagtagctgggataacaggcgcacccacatgcctggctaatttttttgatttttggtagagagaggtcttgctgtgttgcccaggctggtttggaactcctgaactcaagtgatacccctgccacggcctcctaagtcctgggattacaggtgtgagccaccatgcctgtcctcaattgtaaaattttttttttttttttgaggcggagtctcgctccgttgcccaggctggagtgcagtggcacgatctctgctcactgcaagctccgccacccgggttcacgccattctcctgcctcagcctctcaagtagctgggactacaggtgtccactaccaagcccagctaatttttttttatatttttagtagagacagggtttcaccgtgttagtcaggatggtcttgatctcctgacctcgtgatccacccacctcagcctcccaaagtgctgggattaatttgtaaaatttttaaagttaaaaaaaaatgattttaggctgggcgcagtggctcacgcctgtaatcccagcactttgggaggccgaggctggtggatcacctgaggtcaggagttcaagaccaacctgaccaacatggtgaaaccctgtctctactaaaaatacaaaaattagccaggcatggtggtgggtgtttgtagtcccagctacttgggaggctgaggcaggagaatcacttgaacctgggaggcagaggttgcagtgagccgagatcacgccactgcactccagcctgggtgacagagcgagactccatctcaaaaaaaaaaaaaaaaagtttttaagggctttgaaaaggaggaaaaagaaacatgcccaacagggttccattgattgaacaaatttaatttggtgcaaatgcagtaagtgcttaataggctgttggcagggagctagggaatcctccagaaatactttggtcaggataacaccataaaaggagcttgggagatagccagctctggttccatctctggcttcactacttactagctggatgaccttagacaaaccacttaacctctccatactcctttacctcatgaataaaataggataatagtatctaccttgtagtatctatcccaatttttatgggattgctgtttacatatgtcaagtatacaggctggcacctggtcagtgatcagttaagtgttagcttttagcatcgttattattcttgtattatactagtaatatttacctcatatctcactaatataaggtgactgtatcccacttttccgggggtagatttatgtctgttacttcggtgtaattgataacagcaataaatcatttgctctcaaaagtatgtcggattgggcagtaagatttatggttaccctgcctttgggatttttacagtaactcggaagtagtcccttggtgttatgtactaaccatgagaaaaataaatgtctctactcacactttctctgtcactgttcaatcaaaagcagaaccagcagttccaaagatagtgagttatctccattaaatgttcacagttacaggtcaagctctttgttctactcttttgccccttctcacttttgcacttgactggtctttattttaaaacaaaaaacaaaaaagcactatatttatagttaaacaatatttaactatttaaaaacaagtttaaatagttaaaaatatgttacatttccatgctgtttagactatctccaaaactctaggatatacaccagtactgctataatgtgtgacatcatttactgtgttatatcaaaatacctgccagtaacgagagtgcctctgcacttcagtctgggctacagagtgagaccctgtctcaaaaaaaaaaaaattgtttccttgttaagataacactgtgaccaatagtaaatgaattttaaaatattttacctgacatcatcatcaaaacctgtctgtcctatttcacttctggcatatttaaatacatatgtttgatttttaaagtgcatgttctctaattttttttctacttaatattattgtatcctaaacatctgttgttggaagtatttcatatatatccattttaatgaagcatgatgtttcattaagttgacgttccataacttatcattttcttatttttggacctagagattgtttttaattttatgtcatatgtaatgttgcattcctggagtctttttcattcttttgaacattcagagcacaggtattaagacaatgggttgttgggaaaaatgaaatgaaatttaagtgaaaccactttttctcacacgtcagaccattctgcaagcttttttttttttttttttttttttttttaactgatgcattgatctctagaacacaatttaagaaaccttggtaaggaaaaaaagtgaacttctggcctttcttttttaacttgtggtaaacacatttaacatgagaacttaatcatcttgcataattaaaactttttacctgttgaatagcaattccccatttctccctccccgtttctcctggcactctctgcttctcctactctctgctttctattttatatacctcataaaagtggttttatgcaatatttgtcctcctgagactgccttattttacttggcaaaatgtcctccaggttcattcatgttggatatagcaggactttttttttaaggctgagtgatattccatagtatttagataccattttcttaatctactcatccatctattaacatttaggttgtttccacatcttgactaattcagtgaacataggagtgcaaatagcccttcaatatcttaatttcagttcttctgaaaataccaaaagattgataggattgctggatcatagggtagttctatttttaattttttgaggaatctccatactgttttctataatggctgtaccaatttacattaccaccagcagtgtacaagagttccaatttctccacattttcaccagcacttacctttggtttgtttttgtctgtttgtttaatagctaaactgacaggtgtgaggtgataagttctggcctttctaagtgaaaggtgtatggtgaaatcaccaggtaagagtgtgtagagtgagaagaagcccaagtcagcgccctggggcacgcaggaactaagaaaaccctactgtgaaaatgaaatcatacatgatgatggaccagttctggtaggatggttgggtcaacacttagaacagtggattaaagaaatctaaggaagcagggctgggctcaatggctcacgcctgtaatcctagcactttgggaggccaaggcaggcagagcccaggagttcgagaccagtctggccaacatggcaaagccccatctctacaaaaaatataaaaattagccgggcatggtggcacgtgcctgttgtcccagctactcaggaggctgaggtgggaggattgcttgagccccaagggtgcagtgagccatgatagcgccactgcactccagcctgggtgacagagcaaaagaccttgtcttcaaaaaaattaagaaatctaaggaagcagtacattttgcatatacctgtctcaaatgaaatcctatgtaaggttcaaatcatatcagatgaaatggttattgtttatcttctctttgcctccccacatccccccttcaccagatcccccactagctccagagacatctgattcataagacccaatataaaagctaatagactattctttcaaagtccttggtggtgaagggaaggaaaaagcaagacggcacagtaactagaagcagggcaaaggttagtttaagataggagagatgcaagcataattaatgtaggctgtggaaagagagcctggaaagaaggggccaagataaaatgaagaacttgagaaagtgagagagatggatgcagatttaacacatttgtgactgtgtggataggatgttattagacggtcttacttttctttttcctttcttctcttttcttttttttttttgagatggagtctcaccctgtcacccaggctggagtgcagtggtgcagtcttggctcactgcaacctccgtctcccaggttcaagcgattctcctgcctcagcctcccgagtagctgggactacaggtgcatgccaccacacccagctaattttttgtatttttagtagagacggggtttcacagcgttagccaggatggtctcgatctcctgacctcgtgatctgcctgccttggcctcccaaagtgttgggattacaggcgtgagccactgcgccccgccggtctcacttttctttatgatgtataggtgaggccattccctgggcggcttgccagttgtagggcagggtaagaagacagaaaagagatgaaatttaggaaatttcggatgaagaatgggagagagaagaggcttagaacacagaaagcagtccttgaatggtgatggtgctggtgaggtttgaatcacaaacttgttacactggccatttagggcctggatattagctggcagagtaagtgctcaataaaagtgtgtttgtatgaagacatgatttgttccattcctgttgtattttattaaaaaaaaaaacaacctttcctattcatttactattgcatatagaggacttgggtgcatctaacctcaggaagacatgaagaggtgatggactactttatttatttacttatattttttatagagatgggatcttgctatgttatctaagctggtctcaaactcctggcctcaggcagtctttagcctttgcctcccaaagtgctgggattataggcatgagccaccatacctggccctggaccactttggaaagaaatatgaatccacttgattatgaaaacagccgtttattaaatttattaatttattaaacagcctctgcagttaagtatgttctcctagacaagagttggcgaaaactctcacttctgggttaactttcttaaaacacttatgttcactctcttgctcaaaagctttcctagacaacttccaatttaaagaattccaggccaggcgtgttggctaacacctataatcccggcactttgggaggccgaggcaggcagatatctcgagcccaggagttggagaccagcctggccaacatggcgaaacctgtctctggtaaaaatacaaaagttagctgggcatggtggcaggcgccagatacttgggaggctgaagtaggaggatcacctgagcctgaggaggtcaaggctgcagtgagttgtgatcgcactactgaactccggcctgggtgacagagtgaggccttgtctcaaaaccaaaaatacataaataaagattaaagtctaaaccataggtttagtggcttcagacttttacatctgaccctgcactattatacttactctatccttatactggcatatacatgtattttttaaaaaataaaagttaatacaatgtttcttttttgagacagagtcttgctctgtcacccaggctggagtgcagaggggtgatcatggctcactgcagcctcaacctccagggctcaagcagtcctcccacctcatcctcccaagtgactgtaactatgggcacgcaccagtacacctggccaatctttaattcttttgtagggaggaggtctcactatgttgtccaggctggtctcaaactcttgggctcaagtgatcctcctgccttagcctcccaaagagctgggattataggcatgaaccatcttgctaggtcacaaacttgtttttaatttaacaattgctctcaggtcattctgtatttccctttgtatctattatctttggtacaaagcaagctttttttctcccaaaactgtatagtgttacatcaaagtgatacactataacgtatataatcagtttccaattgatggtcatttaaattaatcccatccttttggtataacaagtaaaattacaatcaatatatatgtatatatgtcattttgtgtatgtataaatatatctttaaaataaatttctaaaaggagcaaatgagtaaagaatattttgatagatactattaaaacagcatcctaagtgttgtggcagcttatgctttcaatatatgagagtgtttatcccctgaaaatcttcaccatacttttatccaacttcttgatctttcctgacctcaggagaaaattatcacatggtttaaaagtctacctctctttcaatttgctcagttgagcatctttttctttgtttaaaaacatttgtaggaccagacacggtggctcacaccggtaatctcagcactttgggaggctgaggtaggaggatcacttgaggccaggagttcaagaccagccagggccaacatagttgagaccctatctccacaaaaaataaaaaattagctggatgtggtggcatgtgcctgtagtcccagctactcaggaggctgaggtgggaggatcacttgagcccaagaagattgaggcttgcagtgagctctgacaacactgcaactccagcctggggtgacaaaggctaagactctgtctcaaaaaaaaaaaaaattatatttttgagaattccatttttcctttgtactagtagtctggctaatttgggaggagtttgtttgtttgtttgtttgtttgttttgtttgttttgacggcgtttcactcttcgttgcccaggctggagtgcagtggcacaatctcggctcactgcaaacctctgccctcccgggttcaagtgattctccttgtctcagcctcctgagtggctgggattacaggcacctgccacacatttcctaaggccacatagctaggagtgggaatctaggtctccctgaattcctgggtctagccgaacacacccaggtaatttttgtatttttagcagagacaaggtttcaccatgtaggccaggctggtctcgaactgctaaccgcaggtgatgcacccgccttggcctcccaaagtgctaggattacaggcatgagccaccgcagcccgctggaggagcttttaaatattaataatattagttctttgtgatttgacccgcaacttttcccctcaagttatctgactgtttgtatttgcccttttatggctatgtaatcttaatccttcctaagtcccacagagaagccatttccaaaccattctggttcaacactgacttatctctccctccttgaaattgtaccctcactgggagctcagggtcacctgtcttttcatgtgtttatctcctatctctaagcagatgtcagagttctgaaaggcagaaacatctttacatctaactgttcaacacataaactctcagtaatctttgctgatgataataattgtagcagctctggctgtgttcatatcaagccattgctgcatgtatcgccataacagtgtgtctccttgatttatctttggtttcttcaagttgtcggaatttttgccaagagcagttttatggaatcagcacaaactaatgaagaaagtgagttatcttgcatttgaaaagatgtgtctaggttacatcttaggtcagctgtcacacactatcccaagttcaatgttggctgctggcactgtgctcttttaatgtttctaagtaagacatcttctcacatagtcccagaactgtcaacaatgagataattttttgggaacaggagaatgaccttgcgattctgggaggagagaacgtgatagaaaagatatcagtgactgcaatttgcaacctgttgggaaatcatagtcctctaacattcaccagtcttttaatctgacaaggaggggacattttatgtgttcacagaaacgagagaacacaaagtaaaattaaacaattacatgagaggaaccataatctctgccttctcaagtaaaagatactatctgctgtgttcgggacatgataaagatgtgctatatagtagaccaggagagctttatgaatgtatgtatatatagatttggtttaaacttcttgtaatgttatgggcaaaagatttgtggtacagttaagtgaagaaatttacatagcagttaaagttctgcaaaaaacagaaacgtccataggctgttttaaatgttaaaataaaaacctttaaatgtctatagtagtcataggaaagatataccaaattttaagagattaacttggggtggttgtttttcagattttctccaacatatatgtataactgttgtacatcatccattttagtatcagagcaatacttgaaatacgctaccatctcatccaaaatagccatcagatgatttggccatgctgacacacactcgaaatccactttgctccccctggtatcagtgaacagacatattttaatgattaaatacccaaatgttaactaagaaataaatgtataatcctctctttgagtttgctcaaaggctgaggaagaagagagaaatatcttaaagagatttttaaaattcagcactatcctaatgatcacatgggattcctttttggaccctttctttgaggacagtttaccagaaagacctcattatgatctggtcccatctctgttaaaattagcttgtaatggatctacaaggctgcctacgggtgtagtaacctcacacagaatggatcttaacctccttccttccttttgttgctatgttagaaagggatccattatagccacaagttagtgctttcgaggcttgcatacataggacatgcttattcctgggtttgtgtgtttgtgtgtgtatgtgtatgcaatcaactcaggtgggaaagatttgtgcttactcatgatttaagataaatggaaggattctgttagaagaagtaaatgtaatggttaagagtttggactctggagttagaggttatcctggctcagccactgaacaaatgaagaacaaactgtatagacctcaagaacatacatgagataatccatgtaaagcacctagtccagcgtttggctggtatgaagccatcaataaatgatgatttttaattaaagacgtagctttggctttttatttattttggtctgtaacagcgatgtgaagatcatcttctaaggaaagagcgtattgtagtgcagggtggttcacgtacacatcatcgtgccatcctgcattcacaagtttggttattctgtcttgcaaacgttcaaatggttcctaatgtatttggacatcttactattattaaggtcttgcgattctgaaagttttaaaaagtcctgcccctaggccgggcgtgatggctcacgtctgtagtcccagcactttgggaggccgaggagggcggatcacgaggtcaggagtttgagaccagcctggccaacatagtgaaaccctgtctctactaaaaatacaaaaagttagctggacatggtggcgggcacctgtaatcccagctactctggaggctgaggcaggagaattgcttgaacccaggaggcggaggttgcagtgagccgagattgcaccactgcgctccaccacagagagagactccgtctcaaaaaacaaacaaacaaacaaaaactcaaataacaaaactgactttatattttcatgttacagtctctttaaacaaagttcaaaaattttaaatacattttcattttcaatcagtatattttatcacttcttctttagaagtggttgatggatgatttataagatgcaaaaacaatgtttgtttttttccatagagtttagtaaaacaaaatcacactgtttttccattgaattttgtggctttacttattaaattaactctgaaaaatgtattgtctatattttttatgtgtgaattcataaagttggtagttctgagattaacttggctgtttatttctggactttaaatgaatactcctgaccaacatctgacattgatatgcattgagatatatgattgaaaagatatttctgaaagagatttgtagcttaaaatctagtaataaagatttgttaaatcaattacagcacatacatatgagtaccatgaaactataaaaaatcatgttttaggaaaaaaacaatggcgtaagaaaacattccatgttttcgaattgtgtgaccataaaatgaacatatttcatatcataatacaacagtataggagtatataaagtaaaagctcccccatccattaaactattaatagtggttttcgattccaatgatctgtctttgtgcttctgggtgtttaattattatttttttttgagaccgagtctcgctctgtcgtcacgctggagtacagtggcgccatctcggctcactgcaacctccgcctcccaggttcaagcgattctcctgcctcagcctcctgagtagctgggattacaggcgcgtgccactacgcccagctaatttttttgtatttttagtacagacggggtttcaccatgttggccaggatagtctcgatcttttgagctcatgatccgcccgccttggcctcccaaagtgctgggattacaggcatgagccaccgcgcccggttttaattcttttcttaaatgaacaatactacttttattaacagaaaaataattatagtaaagaaatgttttgtataataactatgacataattcattaaaattctccattaccagtgacagtttttacatgtagacccataggaaaagaagtgatttaagctataaccactaacacttttcctgtagaagctagattattctttgcgaatatagtatttagctaagctggaaagggaaatctgatgccctcttgtggccagtaatttttataggcgatttattccttttcatctggtctaaatatggtctcaatttatagttccctcgtcattagtgtgccattgtcttatcttttaatatttttagccatttgtgtttctttattgatttggccttactaaatgatttactttaattatatacagaccctttttgtatatagtgacattaattcattttcttttacacattttgtgaaaatttaaaattttttccccattccaaatggcctgtcttccaatatttcccaaagctaaagtttatatgtatatatacaaaatgtgtgtatatatatatataatgtgtatatatatatataatatatattatatatgtataatccttccatatttcctctcagttcttttatttatttttattcttggtaaagatggggtctcactttgttgcctaagttggtctcaaacttctggcctcaagcagttctcctaccttggcctcccaaagtgctgagattacaggtgtgagtcagcctcttctcagtactcctatagtttcataacttacgtgatttctttaatatatttggaatctatttttatggtttgaagtagggggttaatttttaaaaatggatagccaaatacctattaatttttgttttgttttagttttttaaaattttttattattattatactttaagttttagggtacatgtgcacaacgtgcaggtttgttacatatgtatacatgtgccgtgttggtgtgctgcactcattaactcgtcatttaacattaggtgtatctcctaatgctgtccctcctccctcccctcaccccacaacagtccctggtgtgtgatgttccccttcctgtgtccatgtgttctcgttgttcaattcccacctatgagtgagaacatgcggtgtttggttttttgtccttgcagtagtttgctgagaatgatggattccagcttcatccatgtccctacaaaggacatgaactcatcattttttatggctgcatagtatcccatggtgtatatgtgccacattttcttaatccagtctatcattgttggacatgtgggttggttccaagtctttgctattgtgaatagtgccgcaataaacctacgtgtgcatgtgtccttatagcagcatgatttataatcctttgggtatatacccagtaatgggatggctgggtcaaatggtatttctagttctagatccctgaggaatcgccacactgacttccacaatggttgaactagtttacagtcccaccaacagtgtaaaagtgttcctatttctccacatcctctccagcacctgttgtttcctgactttttaaatgatcgccattctaactggtgtgagatggtatctcaatgtggttttgatttgcatttctctgatggccagtgatgatgagcattttttcatgtgtcttttggctgcataaatgtcttcttttgagaagtgtctgttcatatccttcacccacttttcgatggggttgtttttttcttgtaaatttgttggagttcattgtagattctggatattagccctttgtcaggtgagtaggttgcaaaaatattctcccattctgtaggttgcctgttcactctgatggtagtttcttttgctgtgcagaagctctttagtttaattagatcccatttgtcaattttggcttttgttgccattgcttttggtgttttagacatgaagtccttgcccatgcctatgtcctgaatggtattgcctaggttttcttctagggttatggttttaggtctaacatgtaagtctttaatccatcttgaattaatttttgtataaggtgtaaggaagggatccagtttcagctttctatatatggctagccagttttcccagcaccatttattaaatagggaatcctttccccattgcttgtttttctcaggtttgtcaaagatcagatagttgtagatatgtggcgttatttctgagggctctgttctgttcgattggtttatatctctgttttggcaccaataccatgctgttttggttactgtaggcttgtagtgtagtttgaagtcaggtagtgtgatgcctccagctttgttcttttggcttaggattgagttggcaatgcgggctcttttttggttccatatgaactttaaagtagttttttccaattctgtgaagaaagtcattggtagcttgatggggatggcattgaatctataaattgccttgggcagtatggccattttcacgatattgattcttcctacccatgagcatggaatgttcttccgtttgtttgtatcctcttttatttcattgagcagtggtttgtagttctccttgaagaggtccttcacatcccttgtaggttggattcgtaggtattttattctctttgaagcaattgtgaatgggagttcactcatgatttggctctctgtttgtctgttattggtgtataagaatacctattaatttttgattagtggattcttcatctttaatttgaaaagccccattcaccaaacttctgtatataaatgtttctggttctggatctgtaattctgtttcactggtgaattagtttattcctatgttatacttcagagtatgtattaataaataatgtaaaaggaaaaatactctctgctcattgttttacttaaaacaattcttggtaattcttgaaatttactcttccatgtaaacttaaaatcaggctttctagttacataaaattttgctgggattttaaaattatgatttctattgactttatgtattaatttgtagaaaagtaaagcttttataatatcaggtccatttaaaaatgatatattcttctattcagtttttgtctttcaccaaattttaataattttcttctctataggactcactcctttttgttgttgttaaagtttatttccaggtatttaataaattttctttcacttttcttttttgcatccctctactccctaatactttttcttaataatggggttttctcccaccaaatactatatttaacatttttctcatgaatattatcatattatatataatgggaacactggaggaaactatgcactattgctaccccattataagtatttactatttcagaatatttccttgtagacacagtatgattacaaacataaaactgtagccacattgcaattgtttaattcagaaatacaacagattgtccacaaaacatacaatttgattatcactgatggcagcatttgcatctgctaaaaataaatccattgaacttgtcttaaagccctttgagaaagtgtctttttaccctccagttacaaagtaataatgctcaatataaaaatttaaagatcaaaatgttgaaagtagaaaaataatattctctgtatttgtcccattccccgcctctgagaacactaactaccattaacaattttttgcccccagacaatactagcaccattctaggcataccatttttttttttattctactcttttttaatggctacatggtattttccacagcatttccttgaacagatgttcaaattttattaaactgttcatctattggtggctacttgggcttttgttatttttgccacccaaaacaattttgcagtgaacacttattacgtaggtaatggtcctcgtttgagtacttctgtagataaatttctagaagtacgtacaattgcttgatcaagggatatatacttcaagaaggtgtaactgccctcctctttaagcctctagtaacactgtaagagactgcttcccctacaccctcaccaatattgggcattattaattttgattcccaaaataaatgttttaatttgtatttagtgttcatatatttattggtcataacactaatattatacacagaaatgatccattaaacctctagtctagatagaaatgtgtttcacccatattccctatggatttatattttataaattttatatatgtatacacacaaataaacattttttagccatggcattgctgtctaaatcataattagtatttttaagtcctatgaaatttaaacacaaagtctcccatgattatgtttcttaacttttatggaagaaatttttgtagctaggtatttttttttttttgataggagaaacaaattcagtacttttatttgtgctgattgtgtgctttacagaataaacatcaaactaccctaattgcagtgatgtatctgctacaagtcttaatggtgaatttgtttttgataagggttaaacatgcttccacttttgtccttatgttacccttaaaagtatacatgaaagaacaaaggaacatagaagatggactaatgctattaaatttggaagtgggtgatggtttctgcaatgaataaaatgtacatattttaaagaggaattgcatgagccttcccttgtgctcatgagtgcttgtgtgacaacttcgcagtacgagtcaatgccataaagtgccatatgcaatgcagggatattgttgtgtttccgtaagagcctcacaatgttattgcttcatccattgcaatagattccagagtatatgaagaaatttggcacaaagtttactaacgttgtacactctgttaaattgccaagtaactgataagtaagaaaaaaaagttaaagactgtgacagacttgggaattactactcattatgtgtgatctttccatgtaacaagtcattggtacagtttgctttgtcatctcagtcttcactctactgggttgtactgtttattgcaatttaatttctatttccagcaataaaattactatcagatgatcagccagctccctcttcagatatatctgagtagtttgtaacaagaaacttggccaaagatttattagtggttaatcaatagatactttaatgtcttatattctcattaatttaccttcgcactggttcctttttttaaaaaaaatcttggtctgataatgaaccttcttacaagtttcaagatttggtagattttataggtaacaaaatgaatctgatggcaaggtaccatggcatgggccttaaaaaagcccagctgggttttaagtcagagcttcattatttagttttctgtgatcttgggcatttttaacttctctggaatccttatctaactgggatgataatggtacataccccctgaggctgtgatgattaaataagttgttgccatgtagtaataaaaattaaaaaaattatttactattatctgtaaaatggacagaatggctacacaataaactgtacatggtaggtgtttgtatttttccctcttcctaatcataaaataagaaattaacacatacctctgttagctgagaagtcaacataaatgctttattatcttaacttggaaccacagaagtttactaaaaagttaaatactttgagataaatattatactaataaaccagaaataagcactgctttagtattaatgtgatagaacttactaaaactttttttttcaaatatccaagtttaacctataaaatttagagctttgcagttatgcctacaaatacaaaaataaaatggagaatttaaacaaattattgttcagtgataaaccactcctgcttgaaatagcccgataaggctttcaagctgaaattatgtagtcatgttttaagagccaccttggagttgtctaagggagacaaacttaagagaacaaagcacctagagtcataattactactaaaaaagggtttggcaaacttttgtaccccatgcttgctagaacttaagacccagttgctgagtgacagttttatttcattaggaatagattggaaaagccatatttatgagagctttcttttgctctaaataagtttcaggacaaggtggaggatgggtagtcgaaacactggcagaatcttctatgagtaataacatctacctgtatgcagttgaattcaaaactagtggtttccccaagaggccctgtcatttaatcgtcagaactaattaaggagattttgtagtaacgtggaatgttctggctactaggtatgtgccaaaaataacacttccttctttacactattatgcttctgattttcccaacaaacctatatagtcatccctcagtatccttggaggatttgttccaggaccctcctggataccaaaatcctcagatgctcaagtgccttatataaaatggcttcgtatttgcatataacctatgtacatcctttaaatctagataatacctaatgcaatgtagttatattttaaaatttgtatttttttaatttttgagtattttccatacatggttaaatacagatgaaaaacctacagatgaggaccaatttgctcataagcaaagcaataaataaattctgtctgctaacttcatgataaaaatacttgaaactttccaactttacgccaatcacctacaaatctgtcattatcaccacaaaactctcaaggacccataaggaagcagtgtgatgactctgaaagtaatttttttttcctttttttctttcaataactttggttaaaaaaaattgataaaacgcatctcccttgtgacactaataaacaaacatgctcatgtttgaataggcagtcactagatttcaggaaaagagtagatatggtttagagagatgttaaaattgtgtatggcttaaagagtacaatattaaagctagaaaagtctctaaggtttaaaaatgagttttctgaagttgcaaactttaaaaactgacattttcatactattgagctatacctttatgatttgtgcagttttgtatttcaacagaatttatcttcctaaaaataacaataatttgtggaatagccatggccattcaatgatttattagcaagttgtgatttttctggtaagtcaaataatttaagactgcaaatttaaagatgaaggtgatggaaaaagtattgctgatcttagtttttaaaaatttacctttggagaaaaatcaaaactcttatagagatatctctttttttctttttgtagttcaagtacccttacaagactgatggaattacagttgtataaatatggactactgaagaatctgaagtattgtattatttgactttattttaggcctctagtaaagacttaaatgttttttaaaaaaagcacaaggcacagagattagagcagctgtaagaacacatctactttatgcaatggcattagacatgtaagtcagatgtcatgtcaaaattagtacgagccaaattctttgttaaaaaaccctatgtatagtgacactgatagttaaaagatgttttattatattttcaataactaccactaacaaatttttaacttttcatatgcatattctgatatgtggtcttttaggaaaagtatggttaatagttgatttttcaaaggaaattttaaaattcttacgttctgtttaatgtttttgctatttagttaaatacattgaagggaaatacccgttcttttccccttttatgcacacaacagaaacacgcgttgtcatgcctcaaactattttttatttgcaactacatgatttcacacaattctcttaaacaacgacataaaatagatttccttgtatataaataacttacatacgctccataaagtaaattctcaaaggtgctagaacaaatcgtccacttctacagtgttctcgtatccaacagagttgatgcacaatatataaatactcaagtccaatattaaaaacttaggcacttgactaactttaataaaatttctcaaactatatcaatatctaaagtgcatatattttttaagaaagattattctcaataacttctataaaaataagtttgatggtttggcccatctaacttcactactattagtaagaacttttaacttttaatgtgtagtaaggtttattctacctttttctcaacatgacaccaacacaatcaaaaacgaagttagtgaggtgctaacatgtgaggattaatccagtgattccggtcacaatgcattccaggaggaggtacccatgtcactggaattgggcgatatggtttattttttcttccctgatttggataaccaaatggaacaggaggaggatagtgattctgatggccattccctcgatacattcctggcttttttctgggcaaagggtgccacattggaagaggtggaaatataagttctgaaatctgtagggaagagaacacattaagttaattcaaaggaaaaaatcatcatctatgttccagatttctcattaaagacaaacaaagttacccacaacactgagatcacatctaagtgacactcctattgtcaggtctaaatacattaaaaacctcatgtgtaataggcgtataatgtataacaggtgaccaatgttttctgaatgcataaagaaatgaataaactcaaacacagtacttcctaaacaacttcaaccaaaaaagaccaaaacatggaacgaatggaagcttgtaaggacatgcttgttttagtccagtggtttccacagctggctaagccaggagtcacttggaggcttttaaatacaaaacattggagctggaggccattatccttagcaaactaatgcagaaacagaaaatcaactaccgcatgttctcacttataagtgggaggtaatgataagaacttatgaacacaaagaaggaaacaatagacattggagtctatttgagaggggagggtgggagaaggaaaaggagcagaaaagataactattgagtactgggcttcacacctgggtgatgaaataatatgtacaacaaatccctgtgacacatgtttacctatggaacaaaccttcatgtgtatccctaaacctaaaataaaagttaaaaaaaaaaaaagataaacacaaaacattcatgccctagcactggtctaatgaacaataataaaatctcagaactagaggccaggtattttgacaaagctccccaggtgattctgatgtagccagtttagtatttgggaataatagttttagattatcccataaatcaggtgggcacgtcaggttcacattattcaaagtgttcttatcagcagttttagacctctctgcttagaatgccacatcttcttaaatttctgattttgctgatctcaaatctgcatttctaagtataggatttttttaaaaaaattatattgtgtatagcattgcattcatgatagaaaattcaaaaagtacaaaagggtaaactgtggaaagtccctctttttttatctcaccctttatcttctttatcttaacccttctcaagggcaactgacaccaaacatttttttaaatatacctttagagatattctatccacatctatacacactttaaaaatatatatgtatactggattgtatcctgctttttacatttcataataatacatttcagaaacatatcaatacataaagatccttctcatttttctacagctagatagtatagcaatgactataaattaaatggtctcctagtaatgggacattgaggctgttttcagtctcttactattaaaaaaacaatgatacacaacgaacaaaacaatgctgcaatgaataacagcacagttaattctaatagaaggctttataggcatattttcgtttcttttggtaaatatttaatacttaggagtggaactgctgagtaatagaagagttacacatttaacgttaaaaagttccagttttccaaagtagtggtactattttacatgactagcaagtttatgaatctagctgcttcacatccttgctaacatttcatgctgtcaggcttttaaattgtgcagttctggaagaactagtgtttcatatggatttaatctgcattcctctgatcataaatgaggccattcacataactccttttgtaaagtgtttattcacatcttttgctcctcctgccctttttttgagattacagcaggatatgcccattatttttcattgaatcatttaccttttactagtgatttgtgagcgattttaaaaaaagtatattctggaaataagtcctttacagatatatgtaatgagaatattttgtcctagtctatggtttgcccattttcttaatggtttctttgatgaacaaaaagatgattaattttgatgaagtccagtttgtcaatttttttcccttattagttactttttgtgaccctctagaggaaatatttgcctgtcacaaaataaagattatatttccctatgttttcttctaaaagcgtcagagatttatcttttatgtctaggtacacaatccatctcaaatcaatatttttgtgtatggtgtcagctaagttaggttcgttttttttcctacacagatcatccagttgtttcagcacaagttcttgaagactttccccattgaattgctttggcacttttgttaaaagggagaaaaaagactaactgtatgtatgtgggtctacttctggactctctatcctgtgccatcaatatatttgtatgtttttaaaccattaccacactgtcttgatgaatatataatagctttgaattagtgtgagccctccaactgatcctccttttttaaaattttgaatcaatttgtcactttccagaaaaaaaccttttaagatgttcattgatactgaattggatctacagatctatttcaggagaactgacacaatcttcatttcttcgttttttaagatatgaataattctttatcccctctcttgggataccttttagaaaacagtagagaacaaaaattccaagctagaaattttgttgtccttatttgataaaacttttttaaagcttgtggcaatgccagattcaagatactagaaagaagaaaatcaaagtgggccatttgcactagctttcacacaagtagtgtttctctattataaaatgttttgctaatgagtattaggccaaggagaaatgttttccttaaaaagcacgtaagagacacctcaatttccatacctttctgttatcctaatagtctttcaacatgagggaaaataaatgcaatttaattttaaaagaaatcctaaaaattaaaggttaatttgcttgtaaaaaattagcagcaatcaatttaatttgagacttacattcttgcttaacaacaaataaaattctgaggtaaaattgccacacatttggatgaattccagaaaattcaatatacctaatttgcaatatataatccatcacacagagaaaaaaaatgcctcaaatatttatggcaaggtttttaaaaatgatcctgaagtacaaatactatgtttacttatttatatagggaatgtctctggaaggatactaaaaaaaagaaaaaaaaacctggtaatgaatgtctctgtggaaatgcatagggactggtggttggggagaaagaggacttctcactattatactgtcttgtactgtttgaagtttcataaagccaggtacatgttatatacatatacatatacatacacatatacatagaatcctaaattatgataatcttcagaaataatcttcccctaaagtctaggaagaataattcaactgagaaaaaaatgagaaaaccaaaaattaagttacactgaaataatgttcattatgtaaatgtatgctgaatttaaaagtttagtttatcatactaaaagctccaatattctgcttcttactcattaggtctaaattttcattttcagctcaaccttaccacaaacctggtatgtttcacatttaatcaaagcaagtaagtaaaaatagataacctttaaaaattagtaataagtacatttacagaataaggctcaactcaaaaaatctctttaaattgttatgactttaaaatatctttcctgttgaagaatgctgtttggtcaacaattttttaaagtcgattaaatgttctttggtatgtagatataaatagtaaatcagtgaatggatctgtaagtgcaggcacactagctatatgacttttcaactagtaaagcaaaaagggagacaatgtttcagcttgagtaaaatattaattataatataataaatttagagaggtttctctttaatcatggaacgggagagaatagaaagttaaacccaaaggtacaaaacaaagtgttacatactacaaaaaataagtggtaacttttgaatgagattttaaaatatcaggaatgttttaccatcatgaattttctactttttgccaatttttctgaaatatatttatcctagttattgtatagtgaagctgacctttgataaaatgactcaggatgcctatttacgtgccagagaaacagctttcccttagcatggggaaaggcaagaactattatccagaatctcaagtcagaaaccttgggcaatgccaagtaggactacctgaaaggtcctggcaatccctgcacatccctttaaaactgagctgttttcatggttacctggtacacaggacttgcggctgcagtcaccgaactgggtttcacttccatttccttacttgtttcttcatctgaagaagaggatcctgaatgataatcagaggtaaccttatcaagggccctggtaactttcctggagatctcatccttgttctcatctttattttcaaagctggcaacaatgaatgcattgtttttctctccatacctaagaataaaattaaaaacttacaaatcttgaagtcacatcagcaaagcaaaaaatgtccataaaaacaaagagatctggacatgccatcaatacaaggcaaagattgaatcatcacagaacttgaccctacacatttaatatcctaatacagctcaatgccagcaagcaaaccacagttttctacttctggtctatttaagtattcataaacataaccccattttctttcccttattttctttctactaattcctaaaaaaaaaattgtttaaaacatcaaaaaaagtccattgttttgattacatttttgtatgtaccaatgaaattggttgtacaataaaacattctgatgtatttttatttttttgagatgggtttcactctgttgcccaggctggagtgcagtggcacaatcacaactcactgcagactctacctcctgggctcaggtgatcgatcctccaacttcaaacctcccaagaggctgggactacaggagtgtaccaccatgctcagctaatttatatacatttttagagacagggtttcaccatgttgctgaggctggtcccaaactcctaggctcaagagatccacccacttcagctacccaaagtgctagaattacaggcatgcgccactggctgatttttttttttttttttttgagacggagtctcactctgttgcccaggctggagtgcaatgggtgcaatctcggcccactacaatctccacctcccaggtgttcaagtgattctcctgcctcagcctcctaagtagctgggattacaggtgcccaccaccacgcccagctaatttttgtatttttagtagagatgaggtttcaccatgctggccaggctggtcttgaactcctgacctcaggtgatccacccgcctcggcctcccaaagtgctgggtttataggcgtgagccatcacgcccagccccagctgtacttataaatgtaacatatatgctagtaattcaagtcacagatcaactagaaatttcctataaaattgactttaaccccaattaaataaaaaagggggcctgttatttatactcacaaaaatgagaactgaggcagttattgagattaaagaaaaaagatagttgttgaagaatatagaggttttgcttaaattatattgcttacttcagagtttcctaggataactactcacctctcatcttaattttttttaaggtaagatgaaaaaatcttgttattcttccaaaacatttttgaagatttttgattttttttaagttgtcaaaatatgtaacatatgctgctggttacttaaaaaaaaattctgaactgtaggaaaatagtgtaataaactcaagtaaaaccaagagtttttattcagtggacataggagaaatccacaaatctatttaaatagattgcacagtgtcaacactatcaaacaatttctagcatcaggacaaaggatattgttaagcggttcttacaaaacacatacagttagaaatgtaattaaagtgattctaagtttgaaaaaagataaaaataagtaactctaagtagaaataatgtcaagcttttgattcaatagttagctgaagttaattcatttcaagatagcactcgtctcaaattatttctgaatcagaatggttatctattataaagtaaaaggcttaactgctataaagcctttgaaaatgtacatgaggctgggtgcagtggcttacacctgtaattccagcacttcaggaggcctaggtgggcagactgcttgagcccaggaatttgagaccagtctgggtaacatggtgagaccctgtctctcaaaaaaacaaaaaaacaagaacaaaaaattaaaaaaacagaaaagaaaatgtatgtggaaatctagcagtctcagagatcacacatagatgagttctatttcttcagatagctatgctgtcttccattcctataggccaaatgaaactataaatactacttaaatatagtacataacttcgcttttgtattcttttttagtttacctcataaaagttgctacaggggctgggcgcggtggctcatgcctgtaatcccagcactttgggaggccaaggcgggtggatcatgaggtcaggcgttcgaggccagcctggccaacatggtgaaaccctgtctctactaaaaatacaaaaaattagccgggcatggtggtgtgcgcctgtaatcccagctactcgggaggctgaggcaggagaattgcttgaacctgggaggcagaggttgcagtgagctgagatcgcaccactgcactccagcctgggcgacagagtgagactccgtctcaaaaaaaaaaaaaaagttgctacgggatggtagaaagggcattagactagtttctcattctggctctgccactgactagcttggtcaccagaggcaagtcacttaatttccctaggccttagtttcctatatgctggacgaggaagctggagctggctagatagtggttgatctacggctggtgactcttcgtagtataaaatacctaaacagaagctggacatggtagcttacatctataattctagtactttggaaggtcaaggcaggaagattgcttgagcccaggagttcacaattatagtgagctatgatcatgccaccgcattccagcctggacaacacagcaagaccctctctctaaaacaaaacaaaacaaacaaaaaataaattcctaaacaattgagttcctcacaacataaaatttgtgttctctaatttcaagtttacttagcataaggttttagcaatacacatttactccatgtcccctccacagttggaagactcaacaaatttcaagacaatcaagggttaattcatgtgttaatgacactaatataacaatgacttaggcctatcttcagttttgcccattaatggaatcaaaattcaaaaatggaaaggcaagaaatttgagaaaaattcctgcctttgtaaacagaaacctcaaccaagggcaaatatctaatgattgaaggatcagcattattaactcagatttctttgacacctagtttggttctgcatttttccctttgtactattttggtatgaaggctctctcttcatggtaagagaagctgctgactatactactataacattacaatgtgcagtcgatatcttaggagaattagtagacacctggacaacttttaaactttccatttttcaatgatcactgataaaacatcaaggctaatttagttatttagaaacaatcaatagtatttaacactctattgggggaaaaaaaggatggcagaaatcaccaaaaaaaaaaaaagttgtaaaatatgttgagtagataagctggcatctgttctcagaacttctcatcataggcaagatttattttctattctgtatcacgaagtgataacctttctaactatatggcactctttgtactcttgcagcattttattctatcagagtaagtgaagactatgaagaatgttctcagtgcatctcaatttttttttacaatcttagtctctagtataccaatgagttattatttttaaagattctcagatatttgatcaattgtatacttgctagatcagctttaattttcaaaatatctatgtttccagttttggtgaaaaaatatttctcaatgtctttttcttctgttaacttatatcaaccacctctactaaacgattaatacgtctttctttttggggttctgttattgaatgaacacctgacactcgcaggtgatttctattagctgtgaaaaaaatcacatcagagccaatttttggcaaatttacatataaattagaagcctactgaatgaaaaggttttctaagattaataagatgaaagcaaagtagcagttttttcctaccaggcatcatcaagtaatgaaatgtctactgaagtagaatgtccgtataactaaagtttttatgttcaggtactgagacttattttaagcattttaaatacataggtccaaaatgtttatataattatgtaacttgttaaacatccttggacataaaaactttcccctgatggtttaggatcattatattgaacgtaaactatttgattgtgtgataacataatcgtgctgattttttagctttttcatttttgcctctatgtcagaccacatgacattttttggtagcgtctgactcatcaaccctctttaaaatgctgcttctcacatttcatgggttaagaaaccacacaactaacttaactgtgtgttaaataggagccaactaggatctaagtgcaggtcaaattaaaaagtaaacaattcaatatagtagctttttgacagctatttcttataaatggaggtcttctgcacaggttcagtggccaaagttttccaagtctgaaactagcctaaagcaggtccttaattagtcccagaatctaaaaatgtttattttctcagacctaaatttgagatagcttgctccttttctacccgagaaagaagtattggagaatgtttatcacaaacctctaccacctacatctggtttccaaaagcaataaacttacaccaaccactggcaaatcaggtagtaacctcaagcggtggtcctgacaaaatttaatggaagaataatcatgtaattcatctctcctgtcttcacctccaccttcattgctggaatcaggtcagtctgcgaccaccttaggagtacatagttagggttccttcaaaaagcaactttactacaatcaataaagaggccaggtggtcaggtgaattgtacctcaaaaccaaatagaaacatcctaaaggcagagccacaggaaaattcttgcaggaattccatgcctctgttcatcttcttcctgctagttagaacatccttcccaccttgtcacctggtcaaccatggctcatccttcacctcccagctcaagtatcacctactcagtagtctcctgactcctcaccagatgcagtaactttctactttgtgcaacctaccactgcattttgtacacatttctaacataaatcagataacaatgtaatttgcttacttttcttctcaatttcaaactgaattacctaaaagcagaatgttgctttcgtttttgaaaaccctacaactgagagtgcctggtccacaaataatggtttttgagcaagtggagttcaaaaagatttcatacctagcactgatctttcacaactctattcattaggagatgtgaaaaataacttccattataaaaataaaaccacgaagtatcactcagtcacttacataatcaaaaaggaggaggccgggcgcagtggctcacgcctgtaatccagcgctttgggaggccaaggcgggcggatcacgaggtcaggagtttgagagcagtctggccaacatggtgaaaccccatctctactacaaatataaaaaaaaattagccgggcacagtggtgggcgcctgtaattccagctactcaggaggctgaggcaggagaatcacttgaacccggcaggcagaggttgcagacagccaagaatgcaccattgcgctccagcctgggcaacaagagtgaaactccgtcccaaaaaaaaagaggagagagggagaataaacagaaacagaaacaaaccaaaagtggttatccagtattatttgggattagcttcttaatttgaagacagacaagtgcaccaccaattaaagataatagacacctagcggaatctaggtgtctacttcttggtctacaataagcttcttggcaaagcactactagaaaacccccgcctaatcagtttcttttttcggctataaagcagaaatctaactagtccttcaacatcacctccagaaaagtatttcataaaatttacatctgagagagttaaaccaccagctcctggccataaagatacacaggcaggccgtacatgacagaatgtcataaaattagttccagcatggtcatcagttcagcctctaaacttgagaactcaccgacagcacacctcacatgggtccacccagagagtgagctcctttggcaagcccaggtcactatacaagatgcagctgttttcacaggctttcaggacatcaggatcaactctctgaaatttattgacacgaatacatctacaacaaagtggagttacgttaatggatttaaatgaatttaatcataaacgccgtaatatctattcatacttgccaaggtgagtaataaaatagtaataaaaaaataccctggtagagaacctaggagcatatctatcctaaacagataataaatgtgaactacaggcacagaggcagcctgaaaaaaagatggcacctatgtgagcccaaggaaatcactagtactgggtctacctcagtctacccagagacttgaccacccatgtacattaaatgagcacggagtatgaaagttgcacgaaattttagaactctgaaggtaaaagtttctataggccaagttcctatacaaaaaaatctctaacaaaaggcctcatctaatgtttcagatggtatttggaaatgcttacgacaaattctgatctgtcattaacttgcttttatatctcagatagtaaagtggtaagaggacacccttgctttacctataattgttctataaatacaggataagtgaaggacacagattcattcatatcatatacttatgattaaaatacctaactaacatgttattggcttatttcatttaacttctatttacccaagcacttttatttaaatagttgtcaaaattaagtgaggaaaatttctaaaccaataaagcctctgtcccatctttttttaacctattatacgacatctacctaatggaatgtttaataaataaaaaatatgcattctgttaaatgataagcattctgattaagtagggaaatagggcctatgaaggaaaagtatttactgcctacaatcaagaatcaatcaagagaacttggatttcagcactaatcctagtatttatcaggtaagcctagttaagtcactgtacctcttcctcagacctgtaactataaaacatggaaatacaagttaattgatgaatagtaattacgctgtaaaatacaatgatataaagactaatgtgctatttaaagtttttgtaaaagttaaattattagttggttttaatttctatttaaaaaatgaaaaagttctcaacaggtaataggaataagtgtttctacataataatattaacaataataagcattttaaaaaatttattatgcaatggacaatttcctaaatgctttgcatgtattaactcttaattctcatgatcatcctgtgagttagatacttttttcctcagcataaagaaaaaaggaggcagagagagtttgagtaacttcccaacattacacagctactaagtgatggatctagggttcaaatccaggccactagactccaaagagcaagttatttccttaatactcaaccctgtatatacgtacctatcttagcgtcaccattaacaatataacaaaggcaaagtgagaaaaattattttctagtatgtaaaatactgcttagtccttttaaaaacatggtcttatgctatagattctaatattgtatagggtaatttgaaagatcccatgtgctctgggaccaaaagcagttaaggataaaaagatatatcttagatgtatgtgtttttcttatctacaattaaggtgatacaggctctaagcttacaaattatatataaatatagatgcttaaacagagactatgcttcaacaaaatctgcataccttacatgttttgtactattttttttcactctacatactacttatccattaactactcttcaaaaacaaaattttaaaagttgcataaaaatattctatcatttacttaatgttgacagtttagttctttccatttttgcaattacaaagtgtaagagacatccatattcatacatgttcgtctgcatttctaattatacttctagaatagattcttgggagacttactgttcaaaaggtatgaatatttttatagatcttgataatattgccaaattgctctctacaagtatcttatttatattgcagaaaaacaatttcaacttacaaacattttgtaagagaaagaacactccacctattctacagactgaagtctctactaacttggttaatcttatattctattcatttttataatagtaacaacccactattttttctacttcaaatacagctttaaaatgactcagtaatgatacttctgatcacatgccaatttaatcgtttcagtttttttctcaagtttttagaattaatggaaatgaaattgtacactgtctgacctttaaatatttacttgacagtgcctcctttttcagtaatagtatggtggcttggcacttccaaaaagccttcatccaatgtcagttaaatcagagtaaaaagcctcaacagttctaacttaacgaaagctgttcactctattggaaatgaaaatatgcaaaaaaaaaattaagataatcaagagataagataaaaaatgacttgagcctgtgttagcgtgcacatttctattttaattcattttccaatttactggaaacctctttggattaaaaatgaaaaggaaaataaactattttgattctcttcttgtcaatagaacacaagctcacttgactttcagtacatgagaaattagcaaataatatgtttacctcctttttagactccttgaatagtgctgtacttgcaagagcccagtggcagaaaggaagtccttctgacatcaaagcacaaagtgttgatttgtgtaggaaactttggggacatcaatatacacaaataaaagagtatttctgtagttatcactatagtcactgttccacttttatttctcgtggccacatccacaaaatgggacaatgtttggcagctgagtttagcagaacattctcaactgaggttcctgagcagtcacataaatactacagtgagcatgccagggcatgttttataggagtctgctcttctttactttaagctgtaaatgtaccttatacagcagagtacaaaagacagctccaagtgagaattaccttcgttctcagtgccaaaacagtggtaacactgtggtgtgcagaaagcccatgaaaacatggggtcatgtagacctgagttcaaatcccagaaccttggccaggcatggtggctcacgcctgtaatcctcacattctgggaggcaaagggagaagatcgcgtgaggccaggagtttgaaactcacctgggtaacacagcaagatcccatctatacaaaaaaaaatttgtttttaaattagcctggtgtgttggcacatgtctataatcctagctactttggagtctgaggcagtaggattgcttgagcccaggagtttgaggctgcagtgagctatggttataccactgcactctagactgggtgacagagcaaaaacaataccacaaaaaaaaaaaactcccagaaaagcaaatcccagagccattatttactagtcgtggatcacaggtgagtcacattcatctagaaaatagttacactgacttctaccacaaatatataaatgagattattcttgtattaacgacatatcaggtgtctgataatcttagttccctttttccatacttttttttttttcaaagaacatataacatgtaatttacttttagatgcaagattcacttctttcaactcctaccatgcccattaatgtgttattaggggtcctctagaattgtgaaaatccctaagtatttgtgataaacagaaatgcactgttaggagccaggctataaccacaaaagactaactcctttgaccccatagcattggcctcctgtgtccaggcagtgggactccaccactccgccaacaaatacttgttttaaaatgagtaaggagaaaatatacaaacaccccagagttctatattttgcagatgaaacacctgtaggcatggtctgcacacccttcaatcatccggccttgaacccacctcaggggttgatcagcctctgcttaatccaatctaatcctttacctgtaggcctgtcctttcgatggtttttctggataccagtgatttttatatttttcttgaagtattagggtcaatttctcagcaaacctctcaactgcctcttttttcaacttatcatgttttcgaactagccttgtgaaaaagaagacaacggcagcaatttcattcttcatttttttccctgcaaagataaaacatgttttctcagaaaaacaaaatataaaaactgggaagatgaagctctgtaagatatacctcctttacagctctccccttcctccttccaattttatcttgtatttctttggcttatatctgaagtagagaacaatctacttatctttatgccataaaggccttattataaaatactacttaaaaatcttatcacttagcttcatgaagaaattccataaagatagcacgttgctcctgttggctaaaataaaaccacacctatcagtaaaagagaagcactataataaatgatacgacatagatgttactgtgtgtgtcaatatttagctgcaataatctaagtttaaaattctgtgaaatgatttgaactttaaaacataaaaaaagtctactttaaaatctagaactgtagagctattttataacagaaaagttcggcagttcctagaaaggttaaacacagagttatcatatgacacggccaattctacttctatttgcccaagagaaatgaaaacatatgtccacaccaaaaccttgtacagaaatgcccatagcagtattcataatagctaaaaagtgaaaacaatatgtttaccaactaaagaatggacaaatactgtgttatacacacgtatggaatattattcagcaatgaaaaggaatgagtactaatacaagctacaatatgggtgaaccttgaacacagaaatgcccacagcagtattcataatagctaaaaagtaaaaacaatctatatgtttaccaattaaggaatggacaaatactgtggtatatacatgtaatggaatattattcagcagttaaaacgaatgagtactaatataagctacaacatgggtgaaccttgaatacatcacactaagggaaagaagccagtcacaaatgaccacatattgtacgattccattgatatgaaatatccagaataagcaaatctatatagacagaagacagattagtggcctacggggaagtgggaaaccaagaaaaggagcattgctaataagtacagggttactttttgaggtgataaaaatatttactaaatttcactatagtaatggttgtacaactttgtgaatatactaaaaccattgaactgtacattttaaatgggtgaattgcatggtatataaattaaatcccaaaactgttctacataaaaaatttcagcattgactttccgaaagtactctttcaggaagagagatacatttatccacaagttaagagacacaaaaactagtggatctatcaggacatatttaagaaatggaaattcaggtcacccgcagaaaaacaaactaaaagaaataatcagagatttagctacattttggattgcctcaaaggactttaaaaatggtatatctgatttatcattgattaatccttaagggcaaacccttgtcctaagattgttttgatgtatgttgtctctactcagtgagctcattcatctggctgctgtaacctggagttattaagatgctgcctttagtaagcaacatcacctttttgggagccaattacgtattaaaaacatacagcctctgctatgtttagcataaaaacaactaacctagcagtagtttgtgttcccacatttccaaaaaaataaagctgattgttagctttcttttctcaaactgctctttcagtctctcttcagaatatgactcctttattccaagtgcaaattcaaacaaggaacctcactgtgaaataaattctacacagttatctgagaggtgtgctggcagccgcagatagcctgatggaggggaaggcacacaaatcttcctcccagaaccctagaatgagaaattcaccttctacagccagctagcaggcaccgggcatgggtccacacacgagtgtacacgtatacataaccccagcccaccacgactgctgtgcagcctcctcctgaaaaatgtaagccatttccactttgtaaagctacgtttatattccaccacgatacgatggaaaagaaaacccaaggcaatttaatatacgggttgggaagaaagttttgctgatggaactacattagcctccactccagcaaagcaaacaaggaaccacactaaagaaatgtactgaatcttttaactagatctttctcctcattcattacatttgccaactatgtgccacatatctgagttctggatttgtttctgtttgctctgcttcatataaaaaaatagaaaagaaggaaagaaccacttagtggttgcttttggttgtaacacaagatgactcatttggacttttgttttccccgtttgaagaaatgatagctcgaacagctgaaaaataagcccactcccaccagtattctaggagtaccaaaaggtgaaagagggagagttacagtcagggcaagaaccaccagaggcaagcagggccaagaagacctcaggcgtcttgagtaagtaggcgtcctccacccacactcagagcaaaaggctcccattttaaatatcgcacggtgacgtcatcctgggacctcgtcaccgcggcggctgctcctcaagttctactttgttccacaaggctcctctgctcacggctgcgtggataaaacccaaagggaatccagaatcaagctcggcctcgcaggagtttataacttttgtacttttccctcccttgtaacgaaaagctaatcgcaaacgtttctaggaacacatttttctcctgatagacgttcccaaggtggagggcgcgagaagactggcccgtggggtgaggagccccggcccgacctcagcggcgccacaaagccatgaagaggggaaataattttccaaggggctaagagttggactttctgaagccatcgaaacctgctgctaggctctcccgctggggttttgagagaggtaggtgaggagggatcaaacatctccacccgctcttgaaagaaccgccttgagctgcgcccaacttctgcaatcccggttttccccaagttcaaggggaagggccctggcgcccaatgcccagcctccccgacaacatcctcgccagggtgcgcctgccccgcgggtccgctgtccccggcgggcggccctgggttcgaggacccggcttcccggaggcgcgactctccagcaaacaagcggagctccagaaaaaacaccgacgcgaagggggtggacagagggtgggaagccgcggggttgtcgcccacccggaggcggaatgtaacgcgctgtgggaaacgtggcaggagccctgaggcggcgtctttttcctcaggcgcccgccgagggtcccgcggaaagcctcgcgggccgccctcgcggcccgcagccccgctctggcgccgagccggagcccatgcaacctggttccatcccctgcccctcccctgtccccggtgcgccgcccgccagcgagccttcgacgtggccgcaggggcgacgggaccaccctcccccgatacccacagccccgccatgtctgcctttccccggcccggtctcctcaccgccgctgccgccgccgctcttcggccggagattcggcggcccagaccgtgtcctggccgggaactgagggctccgcctcaacgggcccgcgctgggcaacagggagcgcagcgagcctcgtccggcgcgtgcggctcccgcgtcgtcgggcggccaagcgcgcgttgagaggactggcgggcggacgagcgcgcacacgagtgagcgcagccccaaagcggcgcgcagggggctcgcggcccggaagaggggaggggcgatgacccgggaaagggttggcgcgcgcgggatcggctcgcgcgcctgaggggcggtgccgggggcggggcttcgccgcgaggccacccccgagccccgggcctagccgcacgggaggcgacacaccctcgccctaccctgagcctggcgcagaccctcgaccgcgacggcgcggtccgcagaaccgcgggcttccctccccggcaaaaagcggcgctgaaggcctgtgggacccccgcccggccgccctacgtgcgtcagcgccttcgggggtcgcgcgggcttggtcctttcggctgtctcggcctttttgtttccccctcaggtctctccacgctgcacttgacaccctcagggcggaatggcgagttctagacccagctctctagacccggggcttcatgggggacacggactcgacgggaaggggaacttggcatttatggacagatcctcatccttcttgctgtagtcaattacacgcacgttaaccgtgcagccgccctgctgtattttaggcggttgttggcactcctagttgggcccttccctggcccctcacagcagggcctgcctcctgtggacgcttgtgtgctgccctggcaccggccactgtgttttgcataaaggagaggctccaaagatgttggccaaaggaatgaagccttgagagtccaggctttctatttctgagacactctactcaaggacttcccagatgcaaagcttcatctttgagcaaatacaaatatggagagggaacattaactttctgaagaaaagaaggaacatcttttcaaccttttatattgagttaacaccatggtcttagttttgtgaaagcactttaatacatccaactagcgggaggaatacaagatattcctacctttttattattattattaaaagagggctaaaccatgttgtaaactacttaagaactgaatgttcaagttgtacagtatattggccagattccttactgcccactaggcttgggagcatgttttcagctcagttttatgaatgttttaaatttgtattactgatctttgttatagccaattagcaattcaaaatggtaatttttttagcagtaataaatataccatcccccaaacagtacaataaactttatttgtaaaaaaaaaaaattatactcttctaggacttagtctacttactggtacatttaaagaggatatttacaccttggagtcttctaggaggtgtgaaggtgtttttattttaaaatcataacaatctgatgaggttatttttacagataaaggcctttaattctgcagtttcataaaatagctaggtaaccacccacattactcaaaatttgtccagaaatttctatagtttaggattagtattttgtgtagtatttataaatctgtggtccacattttccagtcttagagcagtaccatattcaaaaaatacaggcaagaacctgaaacccaatttcaaaatgacttttaaaaaattctcaggctgggcactgtagctcatgcctgtaatccagtactttgggaggtcaaggagagaggatcatttgactccaggagttcaagaccaacctggccaacatcatgaaacccaatctctacaaaaaatacacaaattagccaggtgtggttgcatgcagctgtagtctcagatactctgaaggctggggtgagaggatcacctgagcccaggaaattgaggctgcagtgagctatgataacatcatggcactccagcctgggtgacagagcaagactctgtctaaaaaaagaaaaaaaaattctcatagctgaacactgtgaaatagacacatagcaaacaatgtctcttaaacactttttctctcatccacttcccttgcacacacagtatttgtttttatgtctctttcaaaacttgccctactcttgtgtgcttcagatgctttgccccagctctctttccttgtgagttggaatcacaaaatcacaaatgaattggtatggcaaggcagagccctcctctttatgggactgaaagaggagagctgctataaactaaatgtttgtgtccctcgcaatattcgtatgttggagactaaatccccaatgtgatggtatttggaggtggggcctttgggagacacttaggtcatgagggtggaaccttcatgaatggaattagtgcccttgtaagtggaaacatgagagagatgatcactctgtctgctctcttgccaagtgaggatatagggagaagacagcaaaccagaaagcataccttcaccagacactggatctgctggtaccttgatctttaacttccctacctccaaactgtgagaaatttctgttgtttaagccacacagtctatagtattctgttatagcatcctggaataagacaggagcagagctgatgtaaataattacagtagttcccccttatccacggtaggatatgttccaggatccccagtggatgtctgaaactgcacatggtaccaaaccctatgtataatttataaattaggaacagtaagagattaacaataattataataacagaacaattattatagtacactgtaataaaagttatgtgaatgtatgctcgctctctctcaaaatatcttattgtactgtaccactggtaactaaaactggtgaaaatgaaaccagggataagagggaactactatactcattaatatgtatttccatttcacagctaactttaagatattcacttctattgtgtgttaatggtgtagtttgcttttagcacaagtggtttcttatgaaaatgagccactctaatatgtctagggctttataatcacaggaatcatcacacacatcctgtggttgtgtctcagagttgcagagaatgcaacttagaatcaacaaaatctgtgaaatagctttcaaaattaggacttattttcactaaatatgtgagtctttaaaatcctttgaactcaagagttcagcattaaaagcaaaacagtcggcgggtcgtggtggctcacgcctgtaatcccagaactttgggaggctgaggcaggtggatcacctgaggtcaggagtttgagaccagcctggccaacatggtgaaaccccatctctactaaaaatacaaaaattagccaggtgtggtggcatgctcctgtaatcccagctgctcaggaggctgaggcaggagaatggcttgaacctgggaggtggaggttgcagtgaactgagatcatcgtgctctgcactccagcctgagcaacagagcaagacactatctaaaaaagaaaagaaggaaaaaaaaacagtcttgggtaccatcttctcaattcacttgtcaagtttgaatctgaatacaaaagtcttttttttttttttttttgagacagagtctttctctgttgcccaggctggagtgcagtggtgcaatctcggctcactgcaagctccgcctgccaggttcacgccattctcctgcctcagcctcctgagtagctgggactacaggtgcccaccaccatgcacggctaattttttgtgtttttagtagagacaaggtttcactgtgttacctaggatggtctcgatctcctgacctcatgatctgccaaaacagtcacttttataatggacatggaggattttgtgttatgttagttgcattagctatgtagagaaactggtatgtaacatagaggatgttacgttacatagcatatgttacattatgctatgtaacatcaaggaaaagtgtgtgcagccttctggggcctttggaggtccagcaagtaagatctgagactataattttaagaacacttcaacacatttcttcaaaaatttccagaacttagccatgtaactaaattaaaaaagactaaatctacttctcttgcattagcttcttaaatatccataaagcagcagtgattaaagtataagcataaagaaaatttgcaatcttcattattttctccgttacatcatgccataaaactgacttccaaaagtcaaaacacaaactctcttgatgaatgaggcaatggaaactgggcacaccaacctcctattttgagttgcattaactgtggaaactttcctccctacctcaaagaggcctcaaacttggctcatctttttcagaagaaaatgctttgatcaaacttttcatattattgtttggtaattggttaggatttatgtgaactaggttagggtgatgtataagttatgacactcaagtgggccagacactctatgcttaggtagaacttcatattggaaatccctggagtaaaatttcccagcttggcaggagaggtgccattattgttgttgttgttgttgttgtttggcaatactctcctattctccatgccagcagagaaactgacttttattagtgagtaatgcataaactcctatctttattttagtatatgtgctgccgaagcgagcacaactcctatctttattttagtgcaacaaaattaagaatataataagaatataggtattccggcatacctcggagatattgcgagttcagttccaaaccaccacaattaagtgaatattgcaataatgcaagtcacacactttttgatttcctgtgcctattaaagttatgtttacactatttgtagtctattaagtgtgcagtagcattgtgtctaaaaagtacttaattaaaaaatattttattgccaaaaatgctaatgatcatctgagccttcagggagtcctaatctctctgctggttgaggtcttgcctcgatgctggtgactgctaactgatcagtgtggcgggtgatgaaggtcggggtggctgtggcaattaaaaaaaataagacagtaataaagtttgctccattgattgactctccttttcatgaaagatttctctggtagcttgtgatgttgtttggtagcattttactcaccgtagaacttctttcaaaatgcaagtccatcttctcaaaccctgctgctgctttatcactaagtttatgtaatattctaaattctatgttgtcatttcaacaatgttcgtagcatcttcactaagagtagattttatctcaaaacaccattttgtagccaggcaccgtggctcacacctgtaatcctagcaacttgggagggattgcttgagtccaaggagttaaaggctgcagtaagccttgatcgcagcactgcacttcagcctgggcaacaggagacactcctcattcattcaaattttatcattaaattacagcaattcagccacatcttcagggtccacttctaattctaattctcttgctatttctaccccatctgcagttacttcctccactgaattcttgaatccctcaaagtcattcatgatagttggaatcggcttcttccaaacttctattaatgttgatattttacctttctcctgtgaattgcgaatgtttctaatggcatctacaatagtaaatcctttccctaggttttcaatttacttcgctcagagccatcagagaaatcactacctatggcagctatagccttataaatatatttctttttcttttctttttttttggaggcggggatggaatcttgctctgtcgcccaggctggagtgcaatgacacaatcttggctcactgcaacctttgcctcctggttaaagcaattctctggcctcagcctcccaagtagctgggattacaggcatgcaccaccacgcccggctaatttttgtatttttagaagagacagggtttcaccatgttagccaggctggtctcaaactcctgacttcatgatccacccgccttggcctcacaaagtgctaggattacaagcatgagccaccactcctggccatgaatgtatttcttaaataataagacttgaaattctaacttatcccttgatccatgggctgcacaatagatgttgtgttagagggcatgaaacaacactaatctccttgtagatatccatcagagctcttgggtgactaggtaaattgtcaatgagcagtaatattttaagaggaatatttttttctgagcaataagtcacttaagtaggcttacaatattcagtaaaccatgctgtaaacagatgtgctgtcatctaggctttgttgttttatttctagaacataagcagagaagatttggcataattcttaagggccctagggttttcagaatggtaaatgaccactgacttcaacttaaagtcaccagctgcattatcccctattaagagagttagccaggctgggcgcaatgcctcaagcctgtaatcccaacactttggaaagttgaggtgggtggatcatgtaaaaccaggagttcaagacccacatggcgttcaaggagttcaagaccaggagttcaagaccaacaggagttcatggctaacatggcaaaaccctgtctctactaaaaatacaaaatacaaaattaaaatacaaaatttagctgggcatggtgatgcatgcctgtaatcccagctacacagggggctgaggcaggagaatcgcttgagcctgggaggcagaggtttcagtgagccaagatggtgccattgtactccagtctggcagcctgggcatcagagcaaggctctgtttcaaaaaaaaaaaaaagagagagattcaggctatactttgaagatctgaagtgaggcattgacttctctccagttatgaaggcctagatggcgtctgcttccattataaggttgctttgtctccattgaaaatctgctgtttagtgtagtcaccttcaaccatgttcttagctagatcttctggataaattgcttcagtttctctatcagcatttactgcttcgccttgcacttttatgttatggagatggcttttttccataaacctcatggaccaacctctgatagcttccaacttttcatctgcaactgcctcacctctctcagccttggtagaattgaagagagttaggggcttgctctggattaggctttggcataagggaatgttgtggctggtttgatcttccatccagagactaaaactttctccatatcagcaatatcatgctatcttatcattcatgtattccctggagcagcacttttaatttccttcaagaacttttcttttgtattcacaacttggctgacgagttggcacaagagccctacctttcagcctgtctcgactgacttttgccatccacgctaaacttaatcatctctagctcttgatttaaaatgagagatgtgtgactctttttttcacttgaacatttggaggccattgtagggttattaattggcctaatttcaatgttgttgtgtctcagaaatggagaagcccaaggagagagagacagtggaatggcaaaggtcagtagagcagtcagaacacatgtaacatttatctattaagttaactgtcttgtatgggtgtggttcatggcacctcataacaatcaaaatagtaacatcaaagatcactgatcacaaatcaccttaacagatatattaattttgaaaaagtttgaagtattgtgagaattaccaaaatgtgacacagagacacaaagtgatcacaagctgttggaaaaatgatgcttaaacacttgcttgacacaagattgccaaaatcttcaatttgtaaaaaaacatgcaatatctgcaagttccagttaagtgaagggcaataaagctagatatgccagcattcaattagcaaaaggttcagaaataacgtaaaaaaaaaactgcttgaaatacaactttattaatcagggtcctctagagtcagaaccaataggaggcacagagagaaaataaataaataattttaaaagaaaaaagacagagaggagagatttattttaaacaattggctcatgcaactgtgggagctagcaagttcgaaatctacagggcaagctggcaggctggtaactcaggcaagagttgaagttatagtcttaaacccaaaatccactggcaagatttttatgttatggttttgaggcagaatttcttctctaaaaaacctcagtttttgctcttaaaatgttcaaatgattgatatccacccacattattcaggataatcttctttacttaaagtcaactgagtataaatattaagcacattcacatctagcaatctggatgtgggcaccatagcttagccaagttgacgcatacaatcaaccatcacaacaaccttcattcaatagcattttcttacaggcatgatgataaataggttttaaaacataaatcccctagtgaaccacataaagcatgcttttattaagaaaacaaattaccttgcttttatttttctttgctcttttcagtcagttgtgtggtagtgaggatggggtggggacgggggaaggaggattggatgtctgttttcaggagcatctgcagcataaccatgtcaaatatttgtgctagagcattgggaacagtgcacacattagaaaggatcaaaaggaaataataaattgctcacaatacagtcaaagatactgctataaattaatgtgacccctgcaaaattcaggtgttgctgatgctatcaacagtaccaagagatgggacctttagaaggtaattaggccatgagggctcctctctcatgaacaggattaggtgcctttataaaagggcttgatggaggctcttcatcccacttgccttcagccatgtgaggacacatccttcctcttctctagaggacgcatctctcaccagataatagaacctgctggcaacttgatcttggccttcccagtctccagaactgtgagaaataaatttctgttattcataaattacccagttccaagtattttgttgtagcagcacaaacagactaagacatatgtgagcaatctactttacacattacaagttgtattatgaattaaataccgcataaaagtataaagacaataatggtgtaggtatataaaagggtttgtatgtggttgggctcccagctgaaaggaagtttcacaggcttatgagggcatcattgcaaaccttctttgtaattttctgatacagactggtagaaagggagaaggcataaacataaaggaattgcctctgaggcagagtcactcctttaatacaggcaacatcagttgcaccacagagatggctagaattaatcagattcacacagcaagtcctgacacttgatggcttaattagggtgattacgggtaggcttttaaaattctgctttgtcagcagatgacccaataaaatgttaccgtaaagagcttgttcccaccccaccccagcccaggaggagctcaaaacctggactgtagttagtatattaataatgtttgtgatgtggttggcaaaatattttgtaatgatgtgcttataaaagttgctttaggaggtaatggcagcaggtcaggtttttctttaccttgtaggaagttacagctaactctttttgtgatacaaaaagacatgtctatacctatatataatgcatatatgtatatgctttatttcaggggggcatgaaaagagatttatgacagaacatttttgtcagtgtttttatcctagcttgatgtgctcacaaataactggttttttttccagaaggaaataactaataaactatgatgtgtatcattagcaacaaccaaaacacaatggaggtattatgtatagaaggagagtagaacgaagttgttagattggtgactctattttgttttgtttttgtttgtaattgtagacttgtaaatattgaactatcatggagctgaagaacgaataggagagaataattcttctcactgaatgttcaacataaatataatataaaaaggtgcaccattctaagacactaaaatgtttcagagcaacaactattgggagaatatattcactagtccttcaatatgggtgtgtagcttatgctaatttcactggggatcctcaagtatataatctgtttaatttggaatatctaaaattaagtgatgactctttttttttgagacagggtcttgctgtgtcacccacctcaagcaatcctcccacctcagcctcctgagtagctgggacaacatgcatgtgccatcatgcgcagctaatttttgtatttttttatagagatggggtttcaccatgttgcccaggctgttcctgaactcctgggctcaagccatccacccaccttggcctctcaaagtactgagatttacaggtgtgagccactacacccagccaaagtgatgactctttattttggaagtatttatttattctggaccctttatttctttgatgtattttttaattcgattttattatcttatagacagataattcattaaatacataactaaatgttttaacaatattttggtgtgtgtgcttactgatatgtttgtattcacaaatcagaaaaaaaaaatttaatgtaagagagactttcgaaaacaattaagccccgaggcagcatcactcctctctttacattcatttcctctgtgtttgaactcaccccatggttttgagtactgcctgtgtgagaggactccctaattaatcattccagctcttgataatcctctgaacttcaaacttgtgtatctaacaatgtgatggacatctccacttggatagctgataggcatttcatacataacatgtcccaagataaacccttgtttgcccttgtcccacaactcccactaaacttgccactcctctttgttatctcattatgtcttttttctccatggctgggaccaaaaattttggagtcaacaatgacacccctctttccccaacaccccataagctatccctgagcaaatcctcttgattcaacctaattttcaattctttttgagacactcaagtagcagttttaaatggttcaacccaacatatccagaatctgaccattcctatgtccattgtaatttccctagttcaagctgttgcatgaatgatggcaacatttgtctaattgcattctacacagggtagttcacagtgatccttttatcgtgtaaggctgatcgtgtcatgcctctgccccaaacccccataggctccccatttcacccacagtaaaagacaaaggtctcacaatgttctactaagccccacagtagctgacccctcatttccttacctcccccagcccatgctttctccctctcttgcttcatctcctgctatactcacctcccatttcaatcaagtctcacagtattagttttctattacttccacaacaaatgaccacaaattgccacacacttagcagcttaaagcaacataaatttattatctcacagttctgtagtttggaggtctgaactgtcttggctgtttcctgtgttggtagaatccagtgccttcagtctgcaggactgaggtccctgtttcgtcactggtgtcagctagggcccacccttatctcccagaggacaatccttgctcatgggtccccatatctcagagccagaaacagtgcatgctatcctcatgtttggaatctctctgatttttcccttctgctgaatctctcttgctgcagccagaaaaagttttttgcttttaagggctcatgtgactctattggacccacctggataatctaggataatctctttatcttaaggtctgaaatgccatttccgtctgcaatttctttgccacataatgtaacaaattgacaggtgccaggcatgtgggcatggacatctttggggcaccactatctgcctaccatatggtctcttagccacgcatgcttccatctctgggcccatatgcttgctgtcctgctacctggaatattgttcccccggttaattacgaagctcattacacagcaggtccttgcccaggtatcaccagatcctatcagcctttctgaccagcctgtaaaagaaacatcccccattacacttttttttaccccttaacctgctttttgttttctttctctaaccactatctgacagaatatatttgtgtatctattatatgtctccctctactaagacctttgggagcagaaactttgatttattcactcctggatttgccctacctagacctgtttcttgtacttggtaaaatgttcaataaatatttgttgaatcaccaaaaaagccccagaggccccactgcattaatcatgtttgggcaaaaacatgagtccacgaagtgtgaattttacctaaggaactattttttttttttaaacttattcataggaataccattagtttgtcaaatgccttgctgaggtcattatagcaacttctataggtatctcctgaagctctgaaagaaaaaaatttattgcagatttcaaaatacatagaaaaggagaattctaatgttgccaacacaaagaaaagtgtttgaggtgataaatatcccaattaccgatttgatcattacacattttatatatgtatcaaaataatgacgtaccccaaaatatgtacaactgtgatatataattgatatattaattttaaaaaagaaaagaagtagtttggcattactgtccttggtatacctaaactagctcaaagtgttcatctctttcatctctaattgctgataaactttttattaatctgtgctaaaatctttaaagagctcgagatcaagtctgtagttttcaaatcacttttcatcttctttcaaaatcaggacatataccatttgcaaattcctgatatttctcttatacatttcctcgtttaattatcaacagcataccttaaatctacagatgattctagcaccggagatatcaatcccctcagagttactatttcttctttttctttaactcctcaccttaggatgttagctctgttcttttttacttaaggttgcttttcttggaataaagaatgaaacaaaatgagattctgaagattttatttttgcctccatctgcactgagcgggagtctgaagactttctctgaacttagcaaaacagctttttgagaaccattagcccatttttgacatttagccttcccttccccattgttatgggtttcagccagtgactttttcatttgcagctggtctaccttatgcagtcttttcggtttcctatgcatttcccccttttctttcttcatgggcattatttttcatatacggacagactattttagagttacccatttctcatgagccattttctgttttagatatttgtcaatgcaaacatacctatccccttggaattaagacaggttttttaaaaaaataatttttgagcacatgctaaatgtaagcaagaaaatgtgctatatactgcagagcagttttttctcaaaattggttcctggaccatctgaatctgaaccatggggtggtgataatggtatttattaccatgtaaattaccaattactcaatcagaattagaagggggtagatgggagacttgggaatcaacattttttttttctttatttcttacttgatgaaaagtttcccaaggaatcagcattttttttagcaagtttctcaggttatacttttcaaagcctgacaactttatctgtcaaggatatgcagaagcataagtccctgctgataagaagctaatgctatatttaagatgctatggcataaaaataacataaataatgagtggcacagacaatcagcgcacttgagtcagcaagtgcagctgctgggaatggggtagtgggtgttaaggctggcttcatagagcaggtgtttattgctcataaaaagcactcaagaactgtttgttgaattaatgacaaaagctgtgctgaaaggtaaagaagccataatattgttttagttgagaaagaacttacaacccttttgttttcccccattatcatataggtaaagaaattgagttccagaagagtaattgacacaattgccccatgtcacacaacacggtggtattgaaagagacaagaaggaaagtttcctaacttcaaactttgtgctttctccactatcccgtgagagaatttggactggctacaagcaaggggtaaggcattttaagaactggagtaggccaggtgcagtgtctcatgcctgtaatcccagcactttgggaggccaaggcgggcagatcacctgaggttgggagttcgagaccagcctgaccaacatgcagaaaccccatctctactaaaaatacaaaattagccaggcgtggtggctcatgcctgtaatccccactactcaggaggctgaggcaagagaatcacttgaacctaggaggcggaggttgcggtgagccgagattacaccattgcactccagcctgggcaacaagagcaaaacttcacctcgaaaaaaaagagaactggagtaaatttagtaagatgtgtaataaatgggttgtcattaaccaacaaggaaggacaaaggacttgattgagagattgatgaaagacaggctggaaaaggcaagttaagattgtgaggctgcgtgtggcacctcatgcacctgacctcaccatcctgtaatcccaacactttgggaggccaaggcaggagaattgcttgagcccaagagtcaagaccatcgggaaatatggtctctacaaaatatttaaaagtaaataaaagagaagactgtgagtcacttgaataccagagcaaaaggagtagatattagagagctgctaaaaattttgagacaagataaaagcaatgttaggaaaattaacttgtggttgctactcggaaagatgagagagacaaaagttcagagccagtgagatgccagattaggatccaactttgtggaccatgatgagaaaattaagacccagattggtaaaagtatggatgtgtgaacaaatttaaagtttgggtcaatacaatatggaaacaaatccaattctggtctagttcagtagtttctttcttttagttgattaagtttttagttgattttttctaaaagcaagtaattctctttttttcacactaatgtagaactcaacttttccttttctcaaagcccaactttttttgtgcacaaacaaatcaatactcaaataagagttatacacttaagagattataaaagcaccatttcattcagcaaacctttaaaagaagcatctactctttgttaggcactgttccaagttctgggcctttagaaatgcataagatatggtctctgttttagtcagggttctccagagaaacagaaccaataagatgtgtataaatatatataaagagatttattttaaggaattggctcacacgattatgaaagcgggcaagtcccaagatctgtaagataagttgggaagctggagacccaggggagccactggtatagttctagcctgggtctgaaagcctgggaaccaggagagtccatggtgtagttccagtcccattgccggcgggcttgagacccaggaagagctgacgtttcagatggagtctgaaggcagaaaaacgtcaatgtcccagttcttttttttttttgagacggagtctcgctctgtcgtccaggctggaatgcagtggcgtgatctcggctcactgcaacctctgcctcccaggttcaagcgattttcctgtcttagcctcccgagtagctggaattacaggcgcacgccaccacgcccagctaatttttttgtatttttagtagagatggtgtttcaccatgttggccagactggtctcgaactcctgacctcaggcaatccgccctcctcggcctcccaaagtgttgggattacaggcgtgagccaccgtgcccggccaatgtcccagttcttagaaagtaatcaggcagcaagaattctctctcacttgggagagggtcagcctttttgttctgctgagaccttcaactgattagaggagtcatatccacagcatggagggcaatctgctttactaggtctactgatttaaatgttgatctcatccaaaaacaccctcacagactcaccctgaatgatgctgggctaaatagttgggcatcctatggccagtcaagttgacatatacaattaaccatcacagtctctgtcttcaaggagcttacaacttactgggggtaagagacaaggaggccaatgaatcacagcactttgggaggccgaggtgggccgatcacttgaagccaggagtttgagaccagtctggccaacatagcaaaaccccatttctactaaaaatacaaaaattagctgggtatggtgatgcaggcctgtagtcccagctgctcaggaggctgaagtggaaggatcgcttgaacctgggaggcggagagtgcagtgagccaagatggcaccactgtactccagcctgggcgacagagagagagagagagactgtgtctcaaaaaaaaaaaaaaaaaaaattaaaaaattagccatgtatgttggtatatgcctgtagtcccagctacttaggaggctgatgtcggaggattacctgagtccaggaggttgaggctgtggttagctgtgattgtgccactgcactccagcctgggaacagagtgagaccctgtctcaaacaaaacaaaacaaaacaaaacccaaaaagaagcaaaaaacaaaacagacaaataaaattgcaacttgtaattcatactccaatataggtctttattttaattctatgaaaacatcaaatggaggagctgggcatggtggtggatgcctgtaataccagctacttggaggctgaggcaggaagatcacttgagcccaggagtttgagaccagtttgggcaacatagtgagaccctggcgctataaacaaacaaacaaataagcaaataaataaataaataaataaaacaaagtggagagtgataaactctgcctgtggagaaaggtgaagtcaataacgttacagggaaaatagtttctgtttaggaaaacaccaagatgggccattttatttatggctatcaagctatctgagcattgccagaataacccaggatgtctccaaactgccccaggtgggaggtaaatgggcttccgggtgttggatgtagttgggacattaagagtgagattctaagaaatcaaggctacccaaaaatatattgggctctttcttgaattaaaaaaagacagtcgaatgaaagtttctaagattcaggatttatcaagagacctaagaacaggaatatgttattttttacttccaaattagaaaattgtatgaagtgaaaaattttaaacatatccaaaaatagagagcaaagcacaatgaagcccaatatccatcgagatttaaaattaccaagattgtgtcacacttgcgtaattgctttttctttctttgctaaatatttgaaaacaaatcttagaaatcctgtcatttcactcctacatacttcaagatgcatccctaaaaaatatggtcttttaaaaattcataatgccatttttacatctaacaaaattaatagtaattcctggtatttttggtattatggaatagccagcaatattaaaatatccctgactgtctaaaatatttctgtatactgttggttagttgaatggtaacgcaaagtccacatatttaaatgttttgactctcctgtcttttaaatgtagagaagacttccttcttccttcttcttttttttttttttttttggtttctcatggtattgatttgttgaagaaaatgcatctattgtcattaaaaatgttccatatattgaatttgttataatattcattttaagttatttttctgcaatataatctacatttcactgtattgtttcagaaattctgcttcctactcagctttaagtcaaaggtaattatgggagcaaaggaacttaggagatactttccaggaaggtaatggattacagaaaagaggaaggaagtgcagaattcgaaacgcagggtgtcgaacaagaagacaaagaaagcagcaatggagaaagagagatgacgcagagagagataaggcaactccctggcttccttgtacttaccaaaaaaagtgaaccaaatttgagattctctaagatagttgtaaaaagatcagtattatattaaaagaatgatggaaatctgaatagtaaaatgtattgaacctactaaatagtttgttacattagcactgtgggttctttagcctaaatatagaacttaccatttttttcttgaggaaaagatagattatgacacttacggtagaatcatgtaaaattcagtggtaaataggttcatgtagttttacagttcgttgcttttatagtcttagactataaaataaaacagttgaactgaaaatgtctgctcttacccagttttatcatcccactgcttttcacgctcttttgctttttgttggccagcacactagttcgtttttagccaagtatttcaaagtgtcaaataaaagtactgctgcagccaggcagcagctgacttcatttttactcaagtgtgagatagcactcacagatgtcaacttgtattcttttttaatgaaataattttgatgaattctaaatatactaaagcattgtcagaatcagctttgaaaattcagggtttagtaatcagtgccaactccagtgacacctcaaacataccaaatattcgttctcttagagacctggtgagattaacatgacagtattaatgattttagctttctatattcactcttggtattgctgtcattttatacatttctccacattactgccatctaagacagactctaagctaaagacatttatttgttttgctcagctacccctacgtgtggtagactagataccacttgattatgatgacaattaaaggaagatgaggcttaaaaaatgcttgaatttggatcacggctcactgcaccctctatctcctgggctcaatagatcgttccacctcagcctcctgagcagctgggaccacaggtgtgcaccaccaacctggctaatttttaaattttttgtagatacaggattttatcatgttacccaggctagtctcgaactccagggctcaagtgatccaccagcttcggcctgccaaagtgcttgggaccacaggtgtgagccactgcacccagcctgaatttggaaatttcaacagaaagcagcaaacatgtttgagaatttgagtataaataacttatttatttatgtatttccagtttcagtaccacatagtgagagattcagagtggaccattcgcagttgacaaaattcacacttctccccaagagtttgaagggttttatagtctgtgttaagattgaagcctgagtgaaaatgtctgtgaaaaacaaagtttaagagctcagagggaaacttaagagaacaccatgtaagtgaacagcctattaagaaagatcaaggataagaagaactataaaaagaacagataaggaaagcactcagaataacagttgcatattgatgtggaggctcaactcaaagggggttagaacaggctggtcaaggtttccaaagcgcgacatttaggagacacaaacaaacttggcaagtcatgtggtcattaacctgtacttaaaactgaagagaggccgggcgtggtggctcacgcctgtaatgccagcactttgggaggccgaggcgggcggatcacgaggtcagaagattgagaccatcctggctaacacggtgaaaccccatctctactaaaaatacaaaaaatattagccgggcgtgggggcaggcgcctgtagtcccagctactcaggaggccgaggcaggagaatgacatgaacgcgggaggcagagcttgcagtgagctgagatcgccaccgcactccagcctgggcgacagagtgagactctgtttcaaaaaaataaaaaaataaaactctgaagagaagggtgtgaagggtttgaaggagggtgctcagatttggctaggtgtataatcacagtgttcccaaggtttaggtggtcttattctctaaacctgtgctaagacaattggataatgttggggctcagaaaacgatgtctcatagtgtggctctatagcatgttgaacacagtgaattaaagaaaattggaaggcctgagaagctgcctcagaatcaaggtctctctgatcttcctttgttttcttcccccaggcacagggagagctctccctgaagttctgactgagggaattccttccaaaagaaacacaattgtcttcaatctcctgtctgaaatctcactaaccagggaagattaatcaccaaagaagaaattaaagattatcagctgggcccggtggctcatgcctataagctcagcactttgagaggccaaggcgggaggatggcttgagcctaggagtccgagaccagcctgggcaatatagtgagactccatctctacaaaaaataatagctgggtgagttggtgcacatctgtagtcccagctactcaggaggctgagacaggagagtcacttgagctgggcggaggctgcagtgagctgtgatcgtgccactgcacttcagccagggcaacaaagcaagacccctcaaaaaaaattaaaagaaaagattgtccccacatagtcccagacacacttttcatctattcttctgaggaatggtgcctgagagactttatctgcgtaattagacagcctttgttcacagtgcaattctgccactaaacttctcataaattgtcaccatctctctcagagcccagactaactttgtcccaggctattgtctgttctttgagccaattcatctcccctaaaaattatctattcttcctctaaaattacctacatcccctccttccctctgccttatgaagaaggtatttaaccttcaataatctggcccttctttgagttttatactttgtctgactcccatgtgcttgtacatttataaatttgtatgcctgttctcccattaatctgtctattgtaagtttgtttatagattcgaattctcaaaccttcaggaggtgaaaagaaagttccttttgcccttacaacaacgtgagactagctctgaagttttcattagctatgtgaagcttatatctcagaatagcctcacatacactggtaaagattagcaggtcatttgggctgatggcatagtctggaataacagaggaggaaataaaattttaaaagctcatgaacccaagagtatgatcttcagaggagagatttcctatctcttaaattctacgtaaatagtgaagtcctatatgggggggatccttcatctggggcctaccttgggcagaataatgtagttgtacctcattctatcatagctaaaagacaaagtactttttaagactttgcaaaattttgttcatgttgcgtatctttttaaagtctgactctctgcactaaaataggatagcctaaacagggctcttttcggagtaaaattattatgagcccagtagttttcccagtaagtaagctatcagaacttacaaaaatatgagacagagctttgcagatgtagctagagaaaggtcagttggtggacttgaacttgtttttagtttatttatgtattctccaatactctagactgttctagaaatcactagagagaaataatggtggtattccatgcctatgatacatcacagactacatttggaggactgcagaaagaagcaaaaacagaagtttccataatgagtggtagagatgtgctaaatgtcttctttttcaaactttaatttttaatttttaattttttttagagatgtgatattgctatattgcccaggctatagtgcagtgactattcacaggtgcagtcatagtacactgcaaccctgaactcctgggctccagcaatcctcctgcctaagcatcctgagtagttagaactacaggtgcatgccacaatactgggcttaatgccttctttactgatccttgatggtaaaggggaagaccattttagaacctttgattccttggacataatcccatggtactgctctttaataaagataaattataaggaattggattctatagggaagaaatggatggaagttgtaacaaaatgtaatagtaatgaaatattaatagaaaggcctaaatagaatctgtggcataactctcaaaatagtcctttaataacctccttttgaaaatatcaaggttaagacctagagacgtaaagtcctgcccaaagtcaattgtctggttagtggcacacagagcactaaagtttacatcagcaggttcccagttcagtacatcttctagagcttctaaaaattaatgtgaagatagtctttgctctattgaagcataattataaacatcaaatatttgtaaaatatcttctatatagtaggatgtttttccttttatttattagtaaatttaccacaatattaatttagttagtaaattagaatttttctttcccattcatcatttatgtcaccagcaggtaatcctactccatcctcccaccacatctcatttcattatcacctggcctccagagggtggaatcacttgggcactgctcaagcttatgagatcttaaaatttatttttaaaatatttcaaatcaaaaagtttttgagctgtgaaatttaataagatattgagctttcttctagccttttatccactaattctactcttagaaattacttcctaaaaaaatactttttaagaaaaccacacacacacaaaatgtcctctaactttgttcttttttcttccaagttgttttgtctgttctagatcttctgcactttaatttaaactttagagtcagcttgctacttctacaaagtagctggctgggatttctattagaatgccttgaatatacagatcaatttggaagaaatgacgtcttaacaatatagagtcatctaatctaggaatatggtatatttcttaattgacttaggtcttctttaacatttaattttactcagcaatgttttatagttttcagtgtacaggtcttgaacatcttttgtcgaatttatccttaagtattttacagttttgatgccactgtacatggcaaactttaattttaatttctgattgtttattgctaatataaagaaatgcaattggtttttgatattgactttgtaccctgccactgaactaaactcactttcagttttaacagcttatttgcagattctttagggttttttgatagatgacaatatcgtctgtgaataaacagagatttatgtctccctttccagtctatttgctttttattatttctctttccttattagagtgttagaacctccaggataatgttgaataaaaatagcgggagtggccatctgcaatggttaatttttaaaattaattaattaagttgcttccaaaggatgcagtgttggaagatggctccagactttgaatcctgtttttgggcagtaagatcaaaagctgaaggcaaaaggtatatactaactgattctgtcccttttcattaggaataaaatagctttcctggaagatctaaccagtaaatgttcatttacatttcattaatcagaaatgaattacatgtcaactaacgtcacgttgggaggtatctggggaaataagtttttgtaactgggtattttgctgcgtcaaagaaaatcgaggtttagaaggtaggagagaggttattgggtaattagcagacatgatattgatactaacagttgctgtttcatttatctaatgctgtgcaacaaaacatggcaaagtctagtgacttaaacaacgacgacatttaatacgctcaggtctggattgcgacagggatcagctgcagtggctcaaggactaaggctggaataatctgaaatcttgcttcctcacatgtctgggagttgattttggctgttagctgatggctccactgggacagtgcctggaacaccttcactggctcctctatgcagctgcttggcatctgcacagaatggtggctgagctgctttttatgactcagccttggatatcacatggtgttactattgctgtagtcataggcttacctctctattcaaggggagaggacctgaccccacatttttttctttaagtctcctatcgcttttttttttttttttttttgagacaagtctcactttgtcacccaggctggagtgcagtggtgcgatctcggctcaatgcaacctccacctcccaggttctcctgcctcagcctcccgggtagctgggattacaggctcctgccaccacgccaggctaatttgtttttgtttttttcttttgtatttttagtagagacagggtttcaccatgttggccaggctggtcccaaacttctgacctcaggtgatctacctgcctggtcctccctgaaggctgggattacaggcctgagcaactgtccccggccagaccccacttcttgacagtagaatgccagatacaatttgcccgaaagtgcttacatgcccatgcgctaatgtctgaacaaggttgtttcacttctacaaatgttagccaaaacactctttttccctccctccctccctccctccttcccttccttccttccttccttcctcctttcctttcttcctcccttccttcccttttcccagataatttttttaaaaagaaaaattgggccatgttgtttgctcacttaaaatgtttcaatacttctcattataaatcaaatacagccaggcgtggtgactcgcgcctgtaatcccaacactttggggggccaaggtgggtggattgatacctgaggtcaggagttccaaaacagcctggccaacacggtgaaaccctgtctctactaaaaaacacaaaatttaaccgggtgtggtggcacaatctgtagttcgagcaactcagcaactcaggaggctgaggtgggagaattgcttgaacctggaggtggaggttgcagtgagctgagcgagatctcaccactgcactccagcctagacgacagagcgagaacctgtttcaaaaataaataaataactaaaaagaaataaatcaaatacaatttttttttttttttgctgcagtttatgaggcctggtttatcactccaatttcatctcattttattctgccctctccttgctgtgcttctgttactggacatgtcagatccacaaacatatctgcctcttttgctctactgctttgcacatgctctttgctcctcctgggacatttcctccagcacattgaatgggccagcccctgctcgttcctcacttctcaggggaccttttaatagatgaccagctaagacattacatatcaacgtttatgtttactaatttattgtttatttccccctgtgatataaagtttcacagccacagaaaccttgccagtttggtcactattgtatatctgttagtagtatgtttggcatgtcatcataatctgatgaactagatactgttattatcaataggaactgaagcccaaggctcagaaatggcacagccacactggaatccaggttctcggactccagaagcaatattcgtatttgccctgctctggatgatttagcaaaagagggaaaggatgcatcggttgagtgtgtcatagttaattgagaaaggactccatgaaggcaaggccacttgagcagggccttgagtgatgcatatgcatacattttgtcagatggtgattgaaaaaaagggtattacaggtggtgggaagagtgtgaacagaaatagagttgagaaagcacttgtacagtctaagaatagtgagtaattgtagaataggttgtggaggatttaaaactggaaaggtaggttgcatcattctgtaggtaattagaagacattaacattgttttgtgaagaggagactccatctgtgctttagaaagctaaagctgcacaggcaaagtgtaaggagtcagatgttggtcttgaacaaatcgtatatatacctagaatatcattttacttatttataaaatggaagctgagtgcaatggctcacaactgtgatcccaacactttgggaggctgacatgggaggactgcttgaggctaggattttaagaccagcccaggcaacagagtgagcccctttctcacaaaaagtaaaaaataaatacaatttgaaagatgagaatataaataacatcatgttcatagtttttggtgagagttaaataagatgatcatgtgaaagtactttgcaaactataaagcactacacaaacattagcattttcatcataagtgttctgggtggtcctggggtagggagagtgtacaagtaggcacatagccagagtagttgggcaatggcagagatccaggtaaaatgtgaccaaggtctaaaagaggataagataataagataacattgtccacaaaatcaagtttaagtaggttgtattagtccattcttgcactgctgtaaagaaacatctgaggctaggtaatttacaaataaaagaggtttaattggcacagttttgcaggctgtacaggaaccatagcaacttctccttctggagaggcctcaagaaattcacaatcatggcagaaggtgaaagagaagcaggcacatcttacatgacgtgagcaggaggaagagagaagtgggaggtgctacccacatttaaacaaccagatctcatgagaactcactatcatgagaacagcactaggggaatggtgctaaaccattaatgagaaaccacccccatgattcaatcacctcccaccacaccccacctccaacattggagattacaatttgacatgagatttgggtggggacacagatccaaaccatatcattcgcccctcggcccctcccaaatctcatgttcttttcacattgcaaaatatgatcatggcttccccacaggctctccaaagtcttcattcatttcagcattaactccaaagtctcaaatccaaagtctcatctgaaatcaggcaaactccttccacatataagcttgtaaaataaaaaacaagttagttactttcatgatacaatgaaggtacaggtattgggtaaatactcctgttccaaaagggagaaataggccaaaagaaggggctacaggcctcacagaattccaaaacccagcagagcagtaattaaacctcagagctccaaaataatcttttggactccatgtctcacattcaggttatactggtgtaaggggtggcctcccaaagccttgggcatccctgcccctgtggttttacagggttcagcacctgcagctgctttcatgggctagcattgagtgcctgagcttttccaggcacacagtgcaagctgttgatggctctaccattctgggctctggaggataatggccctcttatcacagctccactagtcagtgctccagtggggacactgtgtggggggctacaaccccacatttctcctctgcactgctgtagtagaggatctctctgagggctccaccctggctacaggcttcagcccggacagccaggcttttttgtacatcctctgaaatctaggcagaggatcccaagcctcaattcctgcactctgtgcacccgcaggcttagcaccatgtggaagccaccaagacttatggtttccaccctctgaagcagtgacccaagctgtaccttagccccttttagctaaggctggagctggagaagttgggatgcaaggggagcagggtcccgaggctgtgcagggcagtggggccttgggcccagcccagaaaatcattcttccctcctaggcctctaggcttgtgatgggaggatctgctgtgaaggtctctaaaatgtctttgaggccttttccacagtgttttggctaacagcacttggctctttttcacttatgcaaatttctgcagcctgcttgaattcctcccctaaaaatgagtttttcttttctaccacatggtcaggctccaaattttccaaacttttatgctctgcttcccttgtaaatataagttccgatttcaggtcatttctttgctcacaaatataaacaaaggctactagaagcaaccaggccacatcgtgaatgctttgctgcttagaaatttcttccaccagatacactaaatcatcactctcaagttcaaagtcctacagatccccagagcagtggcacaatccaaccaagctctttactaaagcatagcaagagtgacctttactccagctcccaataagttcattatttccatctgatacccccttagcctggacttcatgtccatatcactattggcattttggtcacaacaatttaacaagtctctaggaagttccaaactttccctcatcttcctgtcttcttctgagccctgcaaactgttccaacctctgcccattacccggttctaaagctgcttctgcattttcaggtatctttatagcaatggcccactccttagtaccaattttctgtattagtctgttcttgcgctgctataaagaagtacctgagggtgggtaatttataaagaaaagaggtttacttggctcacagttctgcaggctgtctgggaagcctagtggcttatgcttctaaggaggcctcaggaaatttacaatcatggcagaaggtgaaggggaagcaggcacatcttacagagcccagcagaaggaggctagagaggtgggaggtgctacacacttttaaacaatcagatctcatgagaactcactcactatcatgagaacagcactagtaggatggtacaaaaccattcatgagaaaccacccccatgatccaatcacctcccaacaggccccacctgggagggccctcaatttgacatgagatttgggcagccacgcagacccaaaccatatcaggtttatattcataaagctcttagaagatcacctggatgataactcaaaataagtgattatatatacacatcaatctatccacctatccatctatgtttgccaagtaatagaaatgcaaaagacatttaatgatgaaaccaatcaagattatattctttattatatgaaggccatttgcagagaggaaagaatcaaggttaacaaaaaattgtaacacagagtgcctgggagaatgttcattaactgagatagggaagaaacaacagtttttagaaaagattaagacttactttgaagatgatagcttgtctataaaaaacacatatcaagtgttcaaaagcttgttgaaaatggagacataatatacaggatggaaggagctcatggtcagaagaatagatcttgggatttttgcttataattaaagtattttgttgttgtttttttgttttgtttgagatggggcctcgctccatcacccaggctggagtgcagtggaaccatcagggctcactatagcctcaatttcccaggcttaactgattctttcatctcagcctccccagtagctgagactatgtgtgcaccaccacacccagctaactgtttttttgtttgtttgtttgtttgtttgtttgttttggtagagataatggctccctatgttgcataagctagtctcaaactcctgggctcaagtgatcctcccaccttggcctttcaaagttctgggattacaggtgtgggccgctatgctcagcctggttagttgaagttttggatcagactatcaagaatagaaagaaagcaggttagagaaaatgttcaagggcagacccttagagctatgcttctcaagctttacatgtacatgaatcatctgagcaggtacttaaaattcagatcctgggattctgattcagcaggttcttagaaggggcctgagatgccatatttctgacaagcttgcagatcactgccatattgttagtccatggccacagagcagcaagtccctccaacctggtgtactgaggcatgactagaaaattcagggccagggtggagtaggagtaaatggaacttgagaatgcaatataattaataaatggagaagaaagtttccaaaaaagaaaaaaagagagagagagagcaagagagagagagcttcttagtgcaaggacaataattgaagttgttaattttggcaattaagccaaaaggtataaatgggagaatagtttaagtagatgaaagatggaggtcagattacacatagcaggtagaaaaactgagcagtgattgtaaaccagccagtggaaaattcagcagagaaagaaagatgggtagtggctggtagctcaatagggtagtaactttatgagaagtattgcttttaggagcaaaaatactctagtggagaagaaaagagaaagaagagaggaggacagacagaatatgccctagagaacaaaaggaggacttaaatccaatcacaggcaaaaattagacttggaaagaggataggtgaaaaatacagagatgatttcaagcagaggagaggctaggaaatagatacattaattttcaataattttatctgctgagagtggggtacagaactaagacagatgattcaaggagcatagaaaatatttctaatagtctttctgggtgacatgacaaaaaacaaagaagagtgaaataaagatggccctacagaatgaggacacattgaggctagatagcatgaattcatagtgatgccaaatggcaccattacatgactttctcaagcaatgcacagatgcttacaaatgaaacagaagtagatggctgggcttatacaggtgttgggagatggacaacacgagaaagtcatgctgctcacattttaatatctttgattgttgcttcacagttgggtaaagagccaagtgaaaccaggagagagggaagaatcagtggttcaaagcaacgtgatacagaagaatgaacaccagacggatagactgagaaccaggagacttaggttccaattccagttccactttctagatggctgactttgtcccttcaccttcataataaaagtgttgacgtaaatcagttaaaaaccttggctatgcatagaattgcctggggatgtttatacaatattattcctggtccctattttagaacaacaaaatcagattaggagatgtcaactggatatctatgtttttaaagcatgtcaggtgatttctattagatagccagggttgaggacaactaggaaagatgatctctaaagtttatttttctttctagtcttttttagattctccaagaaagacaatggtaagaccagaggcaaaatcaaattcagtaatagtggatatccttagtccattaaggctgctataacagaataaactggttgcctcataaacaacataaatttatttctcacagttctggggcctgagaagttcaagaggaaggtgctggcagatttgatgtctagtgagagcccacttcctggttcatagatgctgcctttttgctgtgtcctcatgtgatagaagaggtcaggaggctctctagggtcccttttataaggtcactaatcccattcatgagggcttctccctatggccttatcacctcccaaaggtaccacctctaaatactaccacattggggattaggcttcaacatatgaattttgggggacataaacattcagtcaagtgcagtgagtgataagaaatgttgaaaaaatagatcagaaagtgcaatgtcagggcaatgatgaggttgggggaaaggccttttatgtgggtggcgaacactacctagggttaaatgctgtggcagcacagaaatagattttattctttttccatgaagaacttatagagttcagatgtcccttccaaatctcatgctgggatgtaatccccagtgttggaaatggggcctggtgagaagtgtttggctcatgggggtgaatttctcatgaatggcttgagccatctccttggtaataagtgagctctcactctgagctcacatgaaatctcgtcgtttaaaaatgtgtggcacctcccccccacacacattgctcttgctctcttgctctctctctctcttgctcctgattctgccgtgtgggatgtttgttccccctttgccttctgccatgacaggaagcttcatgagacctccccagaagcagatgccagtatgcttcctgtacagcctgtagaaccatgagacaaacttcttttcttataaattacccagtctcaggtatgtctttatagcattgcaagaatggcctaatacagggatattatgcaaagaatctgtagaataaaagccatagtcaaaacagtggacagcatgtgggatctagccagagccaatctcagcacttacagactgggccacagactaacataaatggtcacctggcagctgagcccagggtgaaatgacaaaaccacagaaacttattggctattaattcctttcatgtctctcatgtctgtcaccctcaggtctggaatgcaggctcctcagcggtctctctccttcgtattttcttctccatcctgctctgtgattcatttctctgggtcatcttcctatcacttccgatggctgacctctctcacaattcttctactactctctagaaatttcattctattttctatgacatccgcagtgtctttgcagaacttactatgttcctgtcctaatggaaatttggcttttccttgatgtcatcacttctctggcagttttctctgaaaaagctggccattcttcctttctgtatctctgggccaggagatgatagtgacttagaccttcatggtcacttccaaagtttaactctacaatcttatccaaaaagccctctttccttggttgtatgacatctaagtctaacatgcactaccctgcatcaactaatctggtcacttccacaatcaattagaactaagacaagtggttcctcatcaaaaagaatatgaaatgaaaatggccttccctatatgtcttccagtctcttattactttactttggaagcaacttttatcaccagcttttggatatcctttaaaggtattttgtgcaaatataatcacatgcatagatatgcacatataaatgcatgtttatataaatttttggtttcttaaagataaacaaatggtagaaaattatatatcctgttctaaaacctttctttttttaaacaaaatattttaaaggctttttcttatcaatgcatacaaacttttcttttagaaatattactgcataatattttatgtggatgttcaataatttatttgacctgtcccctactgatgaacaactagattcattctagtgtttctagtcttctgctattgcaaacaaggcttctataaataacattctactgatgtcaccttttacttttacaagttatttgggtcaaaagttatttgctttttaaaagttttgatagatactgaaaaaattatactgcatgagctgtgcactaatttatatacccattaactacgtttaaaagaaccagtttcccattagccttgctaacataatattttacactttttttttactttgccaagaacataattgaaaatatttcattgaaattttaatttatgtttttcctatgttgagtgaagttgagcatctttgcaaatgtttaacactgtactttctttcctggacatctcccctgcctattttcctatcgttttattgcaagtctttccatagtaaggaaaatagacttctactaaaatatgagttgcaataattttttctcagtttgttgaattgtcattttggtgtttgtcatgcagaacaattttatttgcatgtcgtttagtttataaatctcttcattttgctatctatattttatatcatactttatacttgttctattttggataattttttaaaaattattttaacacttccatcttttttttattttttattttttaacacaaatcattggtccacctgaaatcctagtcttctttccaactcttgcctcgatcgtggatcacttcagtgttgacgtcacctacacaaaccccacccaccatgttcccggatctcctctgctcagacaaccacctcccttctcacctctcatgacaacatcctggagtgtcttatccttgtgtgatgcttctccatttctaaaactgtaaaactctcacattctattattctcactccctcaacataatctcttatccttcttggtctcttgctctcttagttctgttacatatttgtaatagtttcatttaaacctcagatgtttcaaatctcccttttctctcatatgtctgcccttgctaggcagggccacatcattacgtaagcacttttgccttttggggccccttcctccataaaagaatattaaaaggtacattttatgattaccttataaagataaatatattactatgcataaaaacatttttttggtgtgaaagttttttttattctgattctaaaaataaaataaaacatttttgtgggccccagaagcctagtgaaccccaggttccattcttactatgtgtaaagtatcagtcagctctgctcctaggcactgattgactactacctttttaaaattgagacagggtctcactctgtctggagtgtagtagtgcgatctcagctcattgtaacctctgcctccagggctcaagcaatcctcccacatcagccagcctcccaagtagtagttttttttgtatttttggtagagaaagtgttgcccaggctggtctcaaactccaggactcaagctgtacgcctgccttggcctcccaaaatactgggattacaggcatgagccaccgtgcctggccagaaccacttttctcccttggccctcttctcccttggcccttgttttccctgtgtatctgcattgcccacctccaaccctagataaatctgttgagctctactagagaaaattataaagagggctgatgctatcaaagatttagggtctatgacataaattgggccctcaacactgcttaaccatttttctacttgtccctgatgaattttttgtttcattcctcaaattaatcattccaaatcatttagcagtctccccagctaagagaaaatagtgtaaattatcttaattccctgtcctttcatattctgattagccctgactaagtagcaaaataacccaagatgtagtggcttaaaacaaaatttatttttctttcaagagtctgtgtactgacagcacggcggggcagttcttattgtgggtctcttatgtgacctccatcaccatattgaaactattcttttttggtcactaaagacttctcaattgtctaatctaataggtactttaaaacctttatcttaaccttttcataatatttaaagatattgatcactcccctgttcttgaaactatttgtgggcttttctgaatcttagttttccgtatgacttcttggtacaatatggatggtgaagtcttagagaatgaaaataaagaataggatagtgtattagtttcccacggttactagaacaaattacgacaaacttggtttaaaacaacagaaatttgttctttcatgcttctggaggccagaggtccaaagttagcattggtgggctgcaatcaaggtgttggcagggccatgtttcctccagaagttccagaaaacaatccgtttcttgccacttccagctgctggtagctgtcagaatcccttggcttgtgggtacatcactccaatcttcaaagccagcaccttaaatctctctctctcttccatcttcatattgctttctctccgtgtgtgtcaaatctcctcttgcctctttcttataaagacacacgtgacagcatttagggatcacacagataatccaagacaatctcttcaacttgacatcctttatttaatcacatctgcaaagacattttttcaaataaggtgacatttatagacttcagggattagatcatgaatatctttcagagaaccatttttcagtgtcatattggagaataaaactgacctaggaattccaaactattttgaaagtcatggataattggctgaggtgaatctagctagtgtaaacaaatacatgaatttcaaaagatcagtacaaatcattcagagtgttttttgtttgttttaagaaaagactggaagctgtactctggaagaagaaaatggtgactctcttgcaggtttaagactagtagaaggaagtggctgtcactgaaatgggcttcaagggaagaaatcaggagaaagctaaatttcagttaggacaggaaggtagtgtaggggggcttggagcactcctgtagtcccagctacttgagaggctgaggcagaaggatcatttgagcccaggagttcaaagctctagtgtgcaatgattcgtgaatagccactgcactccaggcaacaaagtgagaccctgcctctgaaaaacaaaaataacaaaggtagaagtagcattaagtgaatattgaccttgatataacagttatgataaaatgaaatcttgttagtgtagggagagactatcataagttaatttgaaatagtatttatttcaaatttatatagtggtagcagaaaccactagaatagatactgtatagttaatgcatcagtaattaattactgttgatatggaaagactattcaaatttcaaacaatagtgcttaactgtgcacttattcagtaactataattaaacagaattaattgaattgatcatctaatgaacatagtgatctttagaagtctgacatcacatagctgtagaacaattgtcccaggagactcttttgagccctgacctatcagggggtaagcatacttcctcatgttatcaagtagtcatttacatatacagctccttaaatccaattttaaactgttttcttcttctttactttcaatctaaaacagtaaaaattttaaaggcagttaattgttaatggtaataaaatcatattttaaattaccatgaatttgctttgaagtgtagagacagtttttagtgttgaacacggtagactgaaattcaaaaagaacaaagtcaaaaatgcaccacaattgctcctgaagcagaggctattgatttcttgcccattatctcatcacacagaaagtgaagggagaaaaatacaagttcaaagacaccagctactcaggtaacaggcaggagcttcaagtgaaaatttctgcctcattaaaaacatttaaaggaagcagcttttctttaagtaggaatcattattcccagtttgagttcatcctctggagttttcacctcttcagaagggcacattctgtgcaatttctaagaagtgcttctttaatgggagggatttatgttaagttggttcaggggaggtagaccattgtggagcctttttaatggactacaaaagactgtcgagtaattaaatagatttcctttcccttagactgttccatggttctaaaaacactcagctgagcatgtaaaatcaatttccattactggccttgacctttgcagttttgtaaacatgttttttccctggctttggaatgtggttcaaaggcaatagcagaagactagaggatgagacaggttctcttaatggaagttaactttttttacagtgaaaatctccttttctcacagacattcattcaactgcatatgttataaatataattatatacatacctgcttatttatgtttatatacatatgtatatgtgtatttaaattggagtatataaatatatgtatgtattttttttaattgacaaatcataattgtatacattcatggggcaccatgttatgttttatgtatctatacaatatgaagtgactaaatctagctaattaacatatccatcacctcacttacttataatttttttttgtggtgagacatttgaaatttactctaagttattttggaatatactatacaatactgactgtagttactctgccgtgcaatagatttcgaaacttatttctcctaatcatacatttgtgccctttgaccaccaactccccattccctgcccccacaaaatataggaagttatacatctttttgttttcctccacagatacgtgtttcgttttcactgctcaaaggtattttcccccttcccattccaagaaaatagccacgccattgtgttccaggggctttggatggtcgaatggaaagcaggtgttccccaagaacagcttcattccatttttgttttgttttgtttggatgattagacctactgcagggattatgccacatcacgtagagtggaggaaaagaaagatgaggtcttctagggggtgctgggaggtggaggcagaattgacttcaggtagcaaattcctcgagacaagaaggaagggagtttgggtggtttgcaaagaaagtagcccccaggtcctgcttgttaactcctagttgggtggattgcctcaggacaaagggaagacctctaggagccctggtctcaggaactgccttgatagagaagtcagagacctttgtccaagcttatcggtgagtaccacttccctcagggactagatcatgagagcctggacaataagcatatcagtgaggaccagtggaggccatacacctttctttcaggatttaggacctaagaagacatctctactcccgatttctgtgtcacctggaagtggaattggaggagggaagtccagaaatgattaaaatgcaatttcctacttgctgacgcagctcaatttgatttaaacaaaatttgtgatacttctttttctcagagctaaggtgaaattttcactgctttttctttcccttaccatttgttcatctgcaaaatggtgattattgtactcaccttgcagagttgtttctagcatttaatcaaatgacctgtgtagagtgactatatcaccaccataatagaaggtgctcaataaattgtcactaggaaatattcacattatatgtgttcatagtgttgcaaaaatggaatcaggtgctaggtttttaaagcacaagacatacttctagttttcaagaattttatattataattataaagctatctagaagtactaggttcatatctctaagcaagaaatacaggcaggtgaatcatgggaaattgaattccattcaatttcataaaagtaaattgaatggaagaatttggaggcagaagtcatgatgtaagacagaaaacctatgggaagcttaagagagaagatagcaacactaaaggtgaaaggaatttgtctgtgatgctatcattagaaaatctcataaacagagagaaagaaaatcttctccaacacacaacatttggacagcaggtttagattttcttcatcttttttctcttcaatttttttccactgcaacgataagctaagagattgattttatttcaagaataactaagggtatactaatatgcatatctcaaaataacattgcattattgaagacatactgttccaatagtcaaacagttaacagagaggggacaggaaccaacaaactggaaaaacacacctgtattatacataaaaatcagtggccaatatttctccagttattctcaaaagaaaaatactcagcaagttacaaactgaaaagctttgcttaaaagctaaacaaaacaaaacaaaccttccatgtataagaaaagctcagccccttaaaaacgagactgttggtgggagttgaaccgttgtggaagacagtgtggcaattcctcaaggatctagaaccagaaatgccatttgacccagaaatcccattaccgggtatatacccaaaggattataaatcattctactataaagacacatgcacacgcatgtttattgcagcactattcaccatagaaaagacttggacccaacccaaatgcccatgaatgatagactggataaaaaaaatgtggcacatatacaccatggaatattatgcagccataaaaaaggatgagttcatgtcctttgcagggacatggataaagcttagcatcatccttagcaaactaacaaggaacagaaaaccaaacgctgcatgttgtcactcataagtgggagttgaacaatgagagcacacggacacagggaggggaacatcacacactggggcctgtcaggggcttgggggaaaggggagggatagcattaggagaaatacctaatgtatatgatgggttgatgggtgcagcaaatcaccatggcatgtgtatacctatgtaacaaacctgcacgttctgcacatgtgccccagaacttaaagtataataaaaaaagatttaaaaaagacaaaacaaacaaaaaccagatagacatccataaagtaaaacaaatgagaaaaactggctaaacttctcaaactaaattatatcaaatatatatatgcatttttgcaaaataaagtactaaactattctttgtagacatattcattacatttattttaataactactttgatataggttgactggctctattctatttgttaaagaaggcaaatgttcccagccatgttttacattaacatgaattatactgccttttttgtttttctgttttggttttttttttttttttttaaggggatttcactcttgttgcccaggctggagcgcagtggtgtgatctctgctcaccacaacctccacctcctgggttcaagcgattctcctgcctcagcctcccgagtagtttggattacaggcatgcgccaccacgcccggctaatttttgtatcttttagtagagatggggtttctccatgttggtcaggctggtctcgaactcccgacctcaggtgatccgcccacctcagcctcccaaagtgctgggattataggagtgagccaccgtgcccagcctgaattatactgtttaatgaagacccagcttttcatttgttttaaatcaaagttataggtgcacaaagtttaaaaaataaaataattcaacagaatattccaaatactccttacctcctgtgatccatttttttctactcaggatcaaccactttcaactcttacctgttttgtttctttctcaggtatatgaccttgatgtttctaaataatgtgctaatatttccagtcttgtttttccccagccattatctattaatatttacatcccattttgttttgttaaaattttttattcttaattatggatacaaaatagtggtatagcttcccattttggaaaatggtgactcctctttacttctcatatctatactccacccccatcccatcacatgaattcttctttgctccccatctttctaaggtggttatattattatttaagttgtaacaaattattgtatgatgatgatgatgatgcaaatgctattcacaactatgccttgtagaatacaatgatttatacaaatatgattgtttttcctatttaaagcctggttttctctaaattaaatagctgtccttaaatatttttatattagttttctatataatcctaattcatactttctgccaattgcctaaatctctcctggtgttgcatacccctgatgcactccttctcgaagatgataatttgttttaatctggaaaggctgatctcagagctggtcacacagctgtattcatggaattgactatgaccacactcctgccatttcattcacctctctcccctgtccccagggtttcatgtcttcatttttcttggtttacccactgactttacttaagcacattctccaggtggttatcttagagagggtgcaggtgatgtaaaattcttgatacctgaatgtctgaaaacattcttattcttctctcatactcaattgatagcttggctagatacagatgtctatattgagaaatgctttctttcagaatttttaagatgttgcttttctaacttccagtgtgctgctgaaaaatccaaggctattcagattcttggtctttttaggtgaccatttcccctcctctttggaagcttgcctttgtccccagttttaagactttgtgatgatgtgacttcagtatggtttactcttagccatcatctgcacactatgaattctcttttaatcagaatacttaggtcattctgttctgagaaactcacttgaaatacttcttaaataattttctcagccttattttctctgttctatttcttgagaactcttatttgaatattgaacttatgaacttgtcctctaagtttctgatttttttcttctcttttttatttttggttctgctttctggaagatttctccaattttattttgtgaaacttctattgagtttgtcatttatgccattacgtatatttttcttttcactcagcacgttctagtctcaccattatatttttaaagaatctaatcttttatatttttatttattggatattccttttcttatggcaggctatacttgtttcatggaaacaatatcttctcatagttccctgaggatattaatgataatacattttcttccctctgtgtcatctctggttcttttggtttgcttacactttaactttgttttctattttttgtattagatgtcttaagtatctagtgatccttcattgtttgcatatatttaagaatatggctcacttagagtgtgtacgtggagattgtgaactttgttgtggggatatctgtgtaggtcagtgtcatgtaatattgttagcagtggcaaatctgtacaggtgtgcagtgactcaattcttgcctcctctgaggaaagaatttggctaaggggcataagatagactgagagactgaggcaacttttagagcaggagtgaaagtttattaaaaagtttcagcgcaggaatgaaaggaagtaaaatgcacttgaaagagggccaagtgggcaacttgagagctccaagggccctgtctgacccttgacttgggattttatacattgctgtgattctgggatttgcatttctttttccctaactcttcctttggggtgggccctccgcatgtgcagtggcttgccagcacttgggctgggctgcatgcacagtgaatttactgaagttgtacacatgttcacttgaggtgtttttcccttaccaatcgagcgtacttagaggcaagtcatataccatttatgtcctgccattttgcctcagtccacatgcttgagcccacttgcccaacccctgatattttattgggaacctgctgataaacagcttcagctattttctggctatttccttggcaccagctgcaaccaattattattttagagagacagttttaacaactgcctgaccatcacctgatggtcgtctgacattcctcggggttggggggcaaccctcttctgccctgctcatgtctgcctggctacctgctctaacaatataactttttatgatgttgaacatgttctatatttgcactgtccgatgctatagctactagccacatgtgcctattgatcacttgaaatgtgactagtgtgactgaggaactggtgttttaattttacttaattttattactttaagttttagaataaattgccacaagcgtctacttcctacttcatcggacaacacagatctaggctatctctgaattttttctatagccagtttggtggattcattagataaagagtttttaactcctttctggaagatttaggcctgattgctagcatgaatgaattttagtttttaatatgtcaacatctacctaatcctaattttctgttcagtattgcagttctcacttctcccagcaccctctgtgttagctttgcccaaaaaataaatttccaggcttttcttgaaagtagataggagacttgaggctctaattgtttgtttttgctcttttcaattttattttcagagccacctagcactaccagttcccaagacttgtgttgcaatcaatggcttctcagcttttctcctaccatcttgggagccagcactttttctgtatgctacatcagttttctttcatttatttcctttccaacttccttttttctttttttttttgagatggagtcttgccctgtcaccaggctggagtgcagtggtgcgatctcagctcactgcaacctctgcctcccaggttcaagtgattctcctgcctcagcctcttgagtagctgggactacaagtgcgcaccaccacgcccagctaatttttgtatttttagagatggggtttcaccatgttggccacgatggtcttgatcttttggcctcgtgatccagccgcctcagcctcccaaagtgctgggattcaggcgtgagctaccgcgcccggccttctttttcttttttccgtcacatgggctggagtgcagtggcacgatcacactcactgcaaccttgaactctcaagctcaagcaatcatcctgcttcagcctcctgagtggctgggactacaggtgtgagccaccatgcctgactaatttatttttgcttttatcttttgtagagacaagggtctcactacgttgcccagactggtctcgaactcctgagctcaagcaatcccgccccagcctcccaaagtgctcagattataggcatgagccaccacacctggccccaacttccaagttttgatgctgttgtctcttccctcatttttggtccctataattttatgttctggaaaaaaaaaactctttatcatgttttagtgggggttcaaaacacaaatgaatatgttcatttagccatctttactccagcgttggtttatttcatatgtgaatctatatttataatctttccaatataatcacttagtctactgttttttaagttgtcctttaaatggaacatttacagtgttacccaactgttataatttagaattcatacctccaggaatcattacaaatccgtgtaaaatatttttgtcttctttttttaccaacgccatcagctgatccctataagcattttaaacttgcactgattgagactgaatcagaacatcgtgtcttctcacaatgagcttttcaaaataattggataggcctctcataacaggaaagattttgtacagattaaaatataaggtgaattcttgtatctctaagaaaaaaatgggaaaaactacactttatattcatacatatataattagctgttcaaaataattgaataggactcctataactggatagattttataaagactccaatataagggaattcattttatttgtatgaaaaaatgttcaggggaaatgtcatcttacattgaagtatttatggtatttaggcaaatctgcacaaaatataaagtattagtgtgacttaaatacataatcattgctactgtgttttcttttctcttctcccactgtaggggtggtcatcaataatgactacagttgtacattttcctgagcataaagattctgattagctataaaagtgccattgattgtacctccatgttcacgggattgggcataagcccattatatttaagggaatatctgacgagggggataagcagagtcataggaagagtaagccattctaaccttacaaggggctacattttgaaacttacatttcagcttgtaccttttctggaatggtatgatttatttctgctccttgttttctaactgtaaactgacttttcttgcaaaataaagatggcggctcatctcttaaacgccacgggtggacccagtcaaggcccatgcttagaaccttcaaagcccaccagtcttcgagaatgtttctttggggaaaaagtaaccagagctagctgcttttgcttgcatgccctttgggtgctaaaaatgagccttggtgtacagctcttctgtttttgctggacctactgtatgacttctgtgtaaatcttgacagttggcaaatcacgcttatgtttgtttttctgttcagtggttgaagctattgctgcaccctcattgttctttcttttccctgaattcctaccccacccagaatttgtaacacacaattttctatctaattatatagtgtcgttttgttgctacttgcttcaggtagtcccactctccctacctccttccttcccgcctccatctaactaaaccgtggtggttcagaagacaaaagtcaggcattgtctgtctttgtaacccccacgtgctgcttgcagagacactcggataataagactcttgcagggagaaaatttcccctttgccctctaaagactcactgaaaatcaacagacaaaaagcacattaataaaagaaaacgcatacagaatttatttgatgtgcacaggatgggagaattgctggagaatgattacccaataacccagggtggtatagaagcttatatatgctttttcccaggggaggggagagatgaggaacgtggaaaattcttttgaggggcagcaaatcatttgagagaatgaatggacccagaagatgggaggcagacattttgggaaggtgagaggtggggctgcacaggaatgaaggttgacttattatgaagcaaagtcctctaggtaatcacttggagctgtcctcagaaggatagatgaaaattctgttggggacatggtgatgactcccagtctcttcttttctctggtggttgatcctccctggttgtttgatgagattccctagaaaaggggtttaagacaattacaattcttttggaaagaaattttcttggtcagataaggacattccagaaagaatcactccctgtgcttgaggtggaggaacaagtcaaggttagaaggaccttgattctgaggcagcttctaagtcctctcaacatttcaaagcaccagtctttggggtatcgctttctgagccccaacactctcatagcgagagacatgactatcgcatgtgttaccatttatagtgtacatcctctgtctcaagtgctgtgaaagcacttcatgtattatttctcattcttacatagatccttcaaggggaatgacatttttactgcctttcccagttgaatctaagactcagagaaggccagtaaattccatacagctagaaagcatcagtcaggatttgaagccaggttgaacccagcatttgaatccatgctctttctacacttgtagtataccaactcctttcattctcagaactcacataaggtctgcatattacagataagcttattctacaagcatattctagcagcattattgaattttcatctagagctgtaatgtggactactaacctagatagaatcgaaatccatctaggatggactggatgctgagacatataatgttagctctgtccttttgggaattaggtgaccagttttccaagcaaatgtacttgtctccttagggccattggatcctggtgagaacctgggagagtcaagatatcatcaatgagcagcctggttctgaaattcagaacccctcctgagtctaacaatggcagaaagctcttaacttattcttcatttccttctctgcattccttactccccagatttaaaaacgacactctctccatgatataatcatgggcaagcactctgagttgagtgtcagaggtattttatttgtcttgggaagatgtaaattcctgggtgtgtacagattccagtggctttccgagggaaagagcatgctgcttttcttaagaaaggccaccaatgggaatgatttctggtgatgcaatgttgatattttagtaccattctagaaaagggaagaggtggggtttctctggagccagattaactcataattagttctcacgcagcctgcttaagtaattatggtgaaaccaaatcacattacttttttctcctgttcctgataaaagcttcaaccccactccttctgccccatagggcacttggctggccatcataccctacactacaggcactattcttcagttctgtttccaggctacaactgtcactgtgtaaaataagaagtgtgggggaaaaatgtacacctctcggtctcactacttcagaggcacctagcaaccctgtctccaggcaggcagcacgcatctccctggtagtttacagcccactcacagcagaggcggcatgctctctgcaaatagcctacgtctttgctggtgccagcttggcggtggggtggtggtgtcatttggtgtcctcagggacgtttggttcttgttctgggaagactagggcaaagcaatgactatttcaccaaaactgcctgagggattagaaattaggtcaagcagttctgtacttggggttgcattgtctaaaatcaaaagcaatggtttttaatctttgtttttctccagtctttgggacatttctgtcataaaccttccagtatgcttgggaagatagaaaaggatgtttatggtgtggcgtggtggctcacgcctctaatcccagcactttggaaggccgaggcgggcagatcatcaggtcaagagatcgagaccatcctggctaacatggtgaaaccccgtctctactaaaaataaaaaaattaaccaggcgtggtggcgggcacctgtaatcctagctacttaggaggctgaggcaggagaattgcttgaacccaggaggcggaggttgcagtgagtcacgatcgcaccactgcactccagcctggcgacagagtgagacttcacctcaaataaataaataaataaacaaataaaggttgtttctaaaaggtatattggccaggcatggtgactcatacctgtaatcccagcactttgggaggccgaggcaggtggatcacctgaggtcaggagtttgagaacagcctgaccaacatggtgaaagcctgtctctactaaaatccaaaaagttagccaggcatggtggtgcatggctttaatcccacctacttgggagactaaggcaggagaatcgcttgaacctgggaagtggaggttgcagtgagccaagatcacaccattgcagtccagcctgggcaacaagagcaaaactgtctctcaaaaataataaataaataataaacatagaaggtgtatctatgcaatgagcaactctgctggccactttgtctatctgtcagcccactaacaatgatacacatcaaccattctcacatccatcctctgcttctagaatgtcagctgggctgaagagcatcttgcactggtttaccaacaagcccacatgaacattccatttcaggctcaagtaccacaggatattatacatagatgctgagactttaaattagatttctgtacctgagggaatttgtaaagagtctttgtttcttaacttcttgtatttgacttcattttaagctccccccctggaagaagggccttggagaatgaaagttgtgtctctttgggaggcacacaaagcttttcctatgtggtaattgattaaagaatggaagaatgcaggcttttaggaatataaggcttgggaaactgagtcctgctgggtagagagatgatctcaagatatcaggaaagggccgggcgcggtggctcacgcctgtaatcccagcactttgggaggccgaggcgggcggatcacgaggtcaggagaccgaggccatcctggctaacacggtgaaaccccgtttctactaaaaatacaaaaaattagccgggcgtggtggtgggcgcctgtagtcccagctgctcaggaggctgaggcaggagaatggcgtgaacccgggaggcggagcttgcagtgagcggagatcgcgccactgcactccagcctgggcgacagagcgagactccgtctcaaaaaaaaaaaaaaaaaaaaaagatatcaggaaggaacaaggttttaacctgcaagagtcattcactcattcacagaacagttattgaattcctaccacgcgccaggccctctgctagcaagggaaacaaatatgaatgacaagtgtaatccacaagctcatagtctacaggatattttagtaaaagcaataattagaaacaatgtcagatttgttgtaatgcaaggaagtgcatagccctttggaatctcagacagtaatgggagacctctctagggagatgaaagggagggaggaagagagggctatataatttaattgttgataatagccacgtttaacaattggctgcaaaatttctgaaaatttaacactccactctcatgagctgataaaaactggctccacaacaccatgggatgaaggtgaaattgggaagtgtagatatgtcttgttgccatgctaaggaggttggactcattccacaaggcaggataatttgaaatactaattagtgcttttatttttcttgttttatatatttttactttccctcaccaaagaagttacctaacttctgtttttcttgtctcagggtcttttgtgctgctgggcagaaaccaaatattttaaagaaataaggctggcattacctatcttcatagcaccttgtagatatggtagaggtgaagaacggtagacagcattgtaggcaaagaccagagggcctatttgtgaatattctggatgagagccctgtaatttcaaaagatctttgatagaaaaggaaggagcacaataaaaagactgaaattgaatttctcactggctgagtggaagagggttgaatataatttaacaactgcagagaatttaagggaagagaacttccttgcactctagtgttatagggtaaaactgatacctgctagtcatacacatgttttaaccagaattatgacctgattttatctaaattttggaaggataactctgccacctgcatagagaaggaattggaaaggggagaaccggatgagcttgttgcaatcatctatgatggtgaggagagtagccagggtagtctaggaaaaaaagaggagaggatagactccagaatatttcagaggataaatcacaattgatgtcaatataactttgaggatttaaaatatgagtggtgtgatttagaggcaaatgcaagccccatgcctattttggttatatctctattttctgcctggcacaaggcctggcagttagcaggtgctcaataaatatatattgaatgaatgaaagagcaaatacatgagtaagtcaaatgcacaaacaactaggcatgtttttattacattaaaagactagtcaaaagaatgagaagacaaatcacggattaagaaaaaaatcttggcaaaagacagatctgacaaaggtctgctatgcaaaatatacgaaaaccttttaacactcaataattaaaaagcatcccaattaaaaaggaggcaaaagacttgaacagagacctcaccaaagaagttacacagatggcaaataagcatatgaagagatgctctagttcatatgtcattagggaactgaaatcaaagtaacagtgatgcctgtcctctagatgcctaatcactagatgcctgctagaatgaccaaaatccagaacagtgacagcaccaaatgcttgtggaaatgaggagcaacaagaactctcattcattgctggtgggaacgcagaatggcacagtaactttggaaggcaggttggcagtttctcacaaggctatatatactcttaccgtatgatccaacaatcatattccttgatgtttacccaaatgagttgaaaactgctgtccacacaaaaacctgcacagatgtttttagcagctttattcataattgccaagacttggaagcaaccaaaatgtctttcggctgggtgaatggataaacaaactgtggcacatccagacaatggaatactattcaacatcaaaaagaaatgagctggctgggcacagtggctcatacctgtaatcctagcactttgggagcttaaggaagaggatcacttaatgttgagaccagtctaggcaacgtggtgaaaccctgtctctacaaaaaatgcaaaaattaaccaggcatggtggtgtgcacctgtggtcccagctacttcaaaggctaaggtgggaggattccttgaccctgggaggtggaggctgcagagctatgaaaagacatggaggaaactgaaatgaaaactactaagtgaaatagtgaaataagctaatctgaaaaggcacacactgtacaattccaagccaaaagtatgggtatggtaaaaagattggagcttgctggagctggaggaaaggaagggatgaataggcagagcacataggatttttagggcagtgaaactattctgtatgatattatcatggtggatacatgtcatcatatacttgtcaaaacccatacaatatataacacccagagtgaatcctaatgtaaactatagactttgagtgataaacacaatttatgggaggccattgttttgagctagcgttccacatgaggctccagcagaccagaccaaactaggatggagtcacttatgttccacattatcaaacggaaccttaaaacgggccagtttaaaaaaataaaaacagcccaggagattccaggcaatctgagtcaatgaataagggagtgccctctgtttcaaccttacaaagaaagtaactttgaaaccaccaatacactttttgttctctgtttctgatttcttcaacattttcctgtctataaagccaatctcctctgctcagcttatcagaacactcattctgttttatagaatgtggtattgcctgattctagaatctcaaatagaagccagttaaatttttaaactagatttggggtaatttgatcttttgacagtgatggtgatttgttaatgtagttcatcagttttaacaaatgtaccactgtggggcaggatgttgattgcggggaaggcttgtgtgtgtgtgggtgtgtgtgtgttggcaggtgggggaggtgcatgtggcagttatgggacctctttggacattacgcccagtttttctgtgaaacttaaagtgctctgaaaataaaagtctaggccagctgcagtggctcacgcctgtaatcccagcactttgggaggctgaggcgggtggatcacgaggtcaggagatcgagaccatcctggctaacacggtgaaacctcgtctctactaaaaatacaaaaaattagccgggcatggtggtgtgcacctgtaatcccagctactcgggaggctgatgcaggggaatcacttgaacccaggaggtggaggttgcactgagcgaaggtcacacgactgcactccagtctgggcaatagagcgaaactccatctcaaaaaaaaaaaaaaaaaaggctatttaaaaggaaaaaatatgagtctcaaagtgacatgagaatttgtgactcagtgtcagaatagtggttatggaaacttcacttctaagtcacctgcagctgatattctgaccagtagactgcacttgtgtaaagatcaatgaacatgatcagaaaaacaaatgctagtgtggcagaaggaaactgagatataacggatcattatgaggtctgtgttgaagaagagggtatgagaatttgaaccaagagttctatgaatgtcaaatgactttgggcttcattggaactctctactagttagagggggtgaatttcctatgcactagcttaccaccgggcagttgtagctattaacatatgaccatgagatctacggaagaaggaaaaaggaaacaactttattttctgagtaacaattagcagattagggaaatgtgctttcaaggaaaccaaaagcatgcagaagggaaggaaacagtggaattcaggtcttccagggtctgtcttacatgcttattcatcaggcttgggaaatagctattaatatttatgggaaaagtcaagctcatgtccagtgagttaacatgtatgtaacatacattccatgttcactttggggtggggttttatcattaaagtgaggtggaatttgactttttacctcaaaaagtgaattatagggcacaaagacatttgtgcacagtctctgaaagctggctgggaccggattagggtctgtagctgcttatcaggaaacaatgtttgtaaggcaggtctcttgtaaaatgggtgctgctggcaggatccctaaggtgggggtccacccaaatgagtctggcaatgttttcctagaacaggtttcagtctaactgcagaaagaaaactttatagcagttaacaagccttttagtagtaatgcaggattttttgctccttttctcggctaaaatccgagttcttgtctcacaaccaggaaaaatcaggtccacggacacattgaaaggtgaggagagcggaatttattaaaagaaagctctcagcaaaaagagggggtcctgccaataggctcccacctcacagactgaataccaggccaccacacacgagctgaagaagccagactctttcccctgattaggcagaattcctggtggctccaccccattcccccagtgctcacgtgagcccccagtccacccagtccattgcaggcatgcccaggcaagatcctgggcaaattcccttatctgtctcctggatctatcggtagttaacaatgtacaggtacatgaccaaacccttttctctgttatggccgcttaattttctcttgagggtctcagccacagagagttcatctcatctgtcagctgggggtatgttaatgttaatataccaaatgccatttcagaccatattgttctaagcaaacaaatatttgcttgtaagcaggcacaacacaattttacagcctgtggtgacttggaatattttcactttcaacccttgaacatcaccttcatgaaaggatttctgcatgatggaggcagataggttctgatcgatgaaagggcagcccttttggtgagatctgatgacaggattgtctgctaagagaaggagcacacggccactggggccttcaatctagaagctgccctttggtatgaacaactggcccagacaggtatttatttatatgtaactcctgcaaatatggagatgtctaacttccaacaatcacacacaacttaaaccccactaatttcaccaatgaaaaattctaacatgctaaataataaaccttctgtatgttgacttcatacaaatactttttaatgccacctggccaattcttttttttttttttttttttgtgatggagttttgctcttgtcatccaggctggagcgcagtgacccgatctcggctcactgcaaccttcgcctcttgggttcaagtgagcctcagcctcccgagtagctgagattacaggcacctgccaccacgcccggctactttttgtatttttagtagagatggggtttcaccatgtttcccaggctgctctcaaactcctgacctcaggtaatctgcccacctcaacctcccaaagtgctgggattacaggccacgcgcccggccccacttggccaattcttagggtgttaattctattaggttacttcatgtgctaatcgatccctagggtacaaattagagttaattgctgcacacagagttcccagtgtttacataccgtagtattgtaaagtgaattacaacacacaatgaaatcaaaggaaacatcaaaaagaaaattttaagaagtccccaacatcaaaatgactgtacctctgctttacattgtatcagttatagctgcctaataacggagattcaattgcgcaagccaccaattattgtgttggagggcatgagcatatatggggctttgcaacattttaataaaacagtttgaaataatttactgtcttgatggttgtagcatcatggctcttttagagattccccattaacaaaaggtagccctttacttataattgcatgtaattttttttttcgattaacaagaaaaaccgtgagtactagggatgtctggggagagcagtcagatatcccagggagaggttgtcatagaaactgtgctggagagcagctatacacagggtaaaatgcaccctccaaagaagagaggatggacattattgtgaagctgccctttctatcagtttcagagtgtaaagctcttaatgaatgtctttgtggaaatcatcctcagtgatagcaagggtaggtagaatagaaggatgctggggctaatgatatatgcctcagctgggtgcagtggctcatgtctataatcccagcactttgggaggccaaggcgggaggattacttgaggccaggagtttgagaccagcctgggtaacaaacataacaagacccccgtctacaaaaacaaaaaccttcataggattgttatagaaaattaaatagataacaatcataaaacacccactatgtatagtccttggaaaatattaatagaaatgataataatttttacatttattatctcatataattctcactagagcaatctgagggaggcacagtcattatttccaactatttttggatacaaaaatttattttcaatcatgtttggacatggggaaggaagagacatattctagaattctatcagaagattaacatcacttgagcaactgctcagtcatacctctgagaatagtaattttaaataaaataacaacttttttttttttgagatggagtctcacactgtttcccaggctgcaatggtgcaatctcagctcactgcaacctccgcctcccatgttcaagcgattctcctacctcagcctcccgagtagctgggattacaggagcctgacaccgcgcctggctaattttttgtacttttagtagagacggggtttcactatgttggccaggctggtctcgaactcctgacctcgtgatctgcccacctcggcctctcaaaatgctgggattacatgcataaggcaccacgcctagccaaaatatttcctttttttcaatgagaaaatgaggatcaaagaagttgagttgctcaaggtcacattgaaagtagtagagctggaacccaaatgcaaggttatctagctctagggcccatgcccttaacgtctctgctggactgaactagtgggcaatcaataactggtaatgattacaaaaatggtggtagaataataaatagtggaagttttgattgccacgctatatgtatggcagaatgtcatagcatttgttgattttgttcatttcctaagtttatttttcccaatggacatggaggaaagtgtcatcctataggatgacaaccaaattgttctgttttctcctcctgactccctaatgcagagctccaggctgctccaaccaatctatggcagatagcacttaagttaaaacctgttggtcatccccacctaatcttagtccttcttcaaaactccaggaaaaccaggaattttctctctctctctctctctctccgtctcccaaaggagcaatttatagctggaacttccttaccatactttccccaatgttttaagaccctatgttttgggctgaattgtgtcccccttctctcaatttatatgttgaaattttaacccttagtacctcagtatgtgactgtttttggtgacaggacttgtaaagagaggattaaggtaaaatgaggtcatagggttggaccctaatccaatatgactgcggtcctcattagaacagattaggacacagacatacacaaaggaaataccatgtgaagacattacaagacaacagtgttggggctcaggacacaatactgcaaggtatggccccttggcgtgttgagtactttgaactgaaagagatagggagggctcagaagcaaggtctctctgacctcttaccttcctttctctctctctccttttccctccaaggcaggtcacagaaactagaactcctctccccaaaggcagctgcaaaacctaaaaatgtcactctctgaccctctcacttttcccttgaaggctttcatgtgacaggtgtcctgacctgtacccggagaaaggaatgctacacagagaggccaaaaagaatttgaacaaacaggcctcgctaagttgcctcctcagttaattaccattagagcataccatatttgtccaatcacatttctattcttcattgaacctaagcataaaaatacatagggttatacagaagttctctgggccttcattctttttttctttcttcttttttctttctgagatggagtctctctctgttgcctaggctggagtgcagtagcgtgatcttggctcactgcaacctctgcctcccagattcaagcaattctcttgcctcagcctcccaagtagctgagattacaggtgcccgccatcacacatgggtcattttcgtatttttagtagagatggggcttcaccatgttggtcaggctggtctcaaactcctgacctcaagtgatctgcccacctcagcctcccaaagtgctgggattacaggcgtgagccaccacacccagcctgggtcttcatttctgaaaacttccatgtcacatgaaacactgattaaatacatgtgttatacttttctcttgctaacctatcttttgtttaggagtgttggctgtgacccttgtgatgggtgaggaagaggtattataccttttttgcccctgcaacaaccatctacaagccaaggagagaggggcctccaaaggaaccaatcatgctgaaggcttatcttagacttctagtctccagaactataaggcaataaaattgtgttacttaaacccccctgtgacactttgctatggcatccctagaaaatgaatgcactgcacagcggcctgagcaccatggctctgttcaaacccatgccaccttttcttccagtcctcttcacttttgacattctgtcactgtgtcggtttcccagtagttaagcgccaggtgtggaatgagaacccattgtgtaaaatggcacaggtccacactgcaattggctctggggaggctaagtcccgggaaaattaatcaagatgtgtactctcctttgtgttcctgtgcctgactcccacttgctcatgctctcccagggcatggtgccttcctcagagctaacacaacactgtgttcatatctagatgaaagttctcacaggactgtgacaccattaatttttttatgtgcctgtttgccacctcaaccctatctccagttaaattctgaattcatagacactgagattatggctatgaattattcattttggtatcccagcatctgctacaattctagtggttcaaaaaaggcataaatttatatttggattttttgagtggatatctttttttctgatttctttctttcttctatacctctgtgaagggagttttataatacagatgtaagggaaagaaattttaaatacgttaaatatgttggtcaggcatggtggttcacgcctgtaatcccagcactttgggaggccaaggtggaaggatcacttgagccctaggaatttgagaccagcgtgggcagaccctgtctctatgaaaaaatttaaaaatgagctgagtgtggtggcacacacctgtagtcccagctacttggaaggctgaggtgggaggatcacttgagctcaggagttggagactgcagtaaggcatgattgtaccactgcactccagtctgggtgacaagcaagactctgtctcaaaaataaacaaacaaatgaataaatatgttatgctatcagcagtggtcaatgtcttaagaaaaagcattcatgtttatcttaaatgctctaatcagaagattctaaaatgtctaagcttcttcttaggggggaaaatccaagcacaatgaaggttgagctgtctaggaaaaacagtcctcaggacctcaaggatcttactgctccctccacctgcaagatggagccgagcccaaggagaggagatggttctaaaataggtacttttcagctggagctggcttagaaagtcactcttaatgtctgatgaagctgtagacaaggaattaccctcaagtagttgaagcttctgttccatcgttcaggagatagggagagaagggagactgcagaagaaagagactccccagtgcctacccaagacagactctgtaaggactgtcaggcagtgggttggaaaatcaatgctttgcctctagactcctctgaactctctttgtgtgtttggatcagttactagtatggttgtttcttttttggcaatgaattgtctctaaatctccttgaactttttggacagaacagagggacatagtaatatatttagattgttatgaactgtatcttgcttgtcatattgaaacatggaaacactaccctcatccactccttagtgaatctcctgctttatcatgggatctggttggaaagaaagtatggtctttctgcccttcacccgtctcttcctagagacactatccaaggatggtcaacttctttgaaagtcttagtaaaaagctgggtcatgagctttggttatttttagacaacaataggcgatggatgaagcaagtttgtaactaggaatgcgtggtttgcactacttggaatgcagtttgccttcgggggtttgctgtttgtaagacaattggcaacaccccacagatttgtgtcaggaacaccaaagaattagaatcaatcatttgtgaagaagcagaacagtcctccattagactttatatattaataaaaatgagcacaagtgagggtcagatctgttcaccaggtccctaattataattcagagagccaggggaaagagaaaaaagtaaaaaaaaaaaaaaaaaaaaaaagaagaatgcctgacgtttgggaacactaaacagagacagaagatttttctgtctttcacgtcaaacatccagccacgtgctcactttttttccttgaaaggcatttaacgttgtgggattatatttttcttcctgactcctagaaaaatataaatgtcatcgacgtttgatctcatctaggtagtttgaaggctcttcgtttgtgggtaggaaagttaatgccacaaaatgtactaaaattcaaaaacattccaactttaatgattcacagcaaagtcagaatgcaggtcagatgctgtatttctgatatttaaaaaatacaaaaagaattctttgaaagtatgtttccaaaagacagtagacatttgtactatttatcattcagcaagagctaaatagcataggaacatggttattctaagttacattttgaaaaaagagaaacaaaacaattatttctgaaaacagcaaaaacatcaagcttgctaatttgaacagttttgacagttgacacaaaggagagaaaagggccttttatgtgttgtataaggaagatctgttgaagaaaattagctcctacaggaataggattgataatgtgacatatactcactctgatctaaatttaacatcttcccacgttctcattgctccaatgcccttcgagttactatagtgatcctaccttgccattcaacatttaattcctaggtaacagacaacaaccgtggcgaccagggaaggaataggcaaaaatctatttattaaatattatctggagttacttgcttgaaaaaacatctcccccacaaccccagcagattttgggctgagttacaactaaaatataaattgtacaagaagaaccaagaagaattttcaggctccaattttgagttttagaatcttgacataatggcacagacccccaaaataaagattctgaaataagcacttttcatctggagctggcctggaaagtctctcttaatgcttgatggagctgtaggcaaggaaataccctcaactagttgcggcttctgttccatccactgatgttgtaccatatgcttatccttcctctaaaatgggcagatacatgatgtgagagttttttctcacaaaattagcttgcattagaaacttccaaatgaaagactcttctgaccactggaaaaacagagtaagtacttactaggttcgtgcaaaagtaattgaggtttttgcatcactttaatggcaaaaccgcaattaacttttgcattaaacctcatacatacatcatgtaagtatacttatatacatactttaaaaatatcttctcagtagccttctctttcagctctccagtaaaagggcgtccaaagatggtagccttctctttcagctctccaataaaaggatgtccaaaaacgcatacctgaggagcacaaaaataccccactatttccaggtattggtcctgtggcaggccaggtctcactaatgcagtcttccataacacctgcttcggtactgactgactggctaagttttaaaagccagtgcccttatacaaagactggaatgtaacaaaagcccaccaagagttttgcctaggcttttcctgagccttaaagcataacaaaataacgaaggaatccttaacgggacccatttaggattaaacaagttttattgggagtctgaagaaactccccaggcttcacaaagaagcttattggggttctgaaggaactccccaaacctccatgatttagcaggagacaagataagggtaatcaccccagcacctggacccatttagatcaagtaaatttattgaggttccaggggaaggtctcaggactcagaccttagttatagattaaaagaagttaatcatggccaggcatggtggctcaagcctgtaatctcagcactttgggaggctgaggcaggtggattgcctgaggtcaggagttcgagacagcctggccaacgtggtgaaaccccatctctactaaaaatacaaaaattagctgggtgtggtggcaggtgcctgtaatcccagctactcaggaggctgagccaggagaatcgcttagaacccgggaggcagagattgcagtgagccaagatttcaccactgcattcctgcctgggtgacagagtagtgagattctgcctcaaaaaaaaaaaaaaaaaaaaaggaaaaaaagttaatcacatgtgtctttagatgaatgcacacttacatgtagacatatagcttacaaggtatataagcgctggaaaactttgtgattttgagttggtctggtgataatttccaggccttctccctgtaaacggctgcagaaataaaaactctctttctccccagttcatctgcatctcgttattgggccacgagaaatagcagcctgatagtcagttacatctgggaacagtcctacaatgcagttttctgtgttagaaatagcaataaatccattcgaatgcagggtcctgaactaagaacccgtactttaaaatctaactttttcattgccatggagtgagcaaaggggaacacaaacaaaaaattaataaaagcagaccaaaagtacactagaaaagtagacagtgaaaaaaggaaaggagagatagatatgacgaaaataaagtgttatattcagaaatcagaaagtaatactgattgtaacatttgttaaactcttcctttatccccaggctcatgctaagcaccttaccttcattattgtatgaagtcctcgtggcagctatgtgggcttgccactattaatatttccatattacagaaatatagggtccagccctacggagcttggcgggtgttctcctggtgtgcagagatgagagattgtaataaataaagacacaagacaaaacgattaagagaaaagagctggacccggggaccactaccattaagacgcatagactggtagtggccctgaacggctggacacactgatatttattgcatataagacaagggggcagggtaaggagggtgaatcttctaagtgattgacaaggtgaagcaagtcacatgatcacaggacaggtggcccttccttcttaggtagccaaagcacacagagagaaggcagcataggtcagtgttttcttctatgcacttataagaaagatcaaagactttaagactgtcaccatttctgctaccgctatctactacgaacttcaaagaggaaccaggagtatgggaggaacatgaaagtggacaaggagagtgaccattgaagcacagcaccacagggaggggtttaggcctccggatgactgcgcgcaggcctggataatatccagcctcccaccagaagctgctggagcagagttttccctgactcctccaaggaaaggagactccctctcgcagtctgctaagtaaccggtgccttcccagacactggcgttaccgcttgaccaaggagccctcaagcggcccttatgcaggcgtgacagaaggctcacctcttgccttctaggtcacttctcacaatgtcccttcagcacctgaccctatacccactggttattcctaggttatattagtaatgcaacaaagagtaatattaaaagctaatgattaataatgtttataataatgattgataattgttcatgatcatctctatatctaatttgtattatgactattcttattctaactattttctttattatactgaaacagtttgtgccttcagtctcttgcctcggcacctgggtaatcctccgccctcagagacaaggaatcaagggtgagtccattaaggcaatttgcacaagaaatccccagtaagaaagtaagtgggccgggcttggtggctcatgcctgtaatcccagcattttgggaggccgaggcaggcggatcacgaggtcaggagatcaagaccaccctggctaacacagcgaaaccctgtctctactaaaaatacaaaaaaaaaaaaaaattagctggtcatggtggcaggtgcctgtagtcccagctactcaggaggctgaggcaggagaatggcgtgaacctgggaggcagagcttgcagtgagctgagatcgcactactgcactccagcctaggcaacagggcgagactccatctcaaaaaaaaaaattaagtggtagaacttgcatatattaaaaaaaaaaaaaaaaaagcccaagctgtctggactccagaatctgaactcgtagtgggtatcatggagagagggaaaagtataaatataaaaaagagaaaatatgtaacaaaagagaaattaattcctgctgtatgtggaggagacattacaggtaattggtctcacaagtgccaaaatatacgctacagcaggtgtccccagctactgggccagggactggtacttgtctgtagcctattaggagccaattcacacagcaggaggtgagcggtgggcgagttagcattaccacctgagctctgcctcctgtcagatcagcagcagcgttagattctcataagattgcaaaccctattgtgaactgcacatgcaatggatctaggttgcatgctgtttttgagaatctaatgcctgatgatctgtcactgtctcccatcacctcccagatgggactgtctagttgcaggcaaacaagctcagggctcccactgattctacatgatggtgagttgtataattatttcattatatattacaatgtaacataatagaaataaagtgcacaataaatgtaatgtgcttgcatcatcttgaaaccatccccgcatccagtccatggaaaaattgtcttccatgaaactggtccctggtgccaaaaagattggagaccactgctctatgggatccatgagccttgtactttaccctaaaccagtgaattcacaaagtcaaggagtcagaatgggtttccaaagctctccttgaatggaagcaaccagaaactgtggtgtagattttacttttacaaaagtgaaacaattcttttgaatagaataactttttattctcctgcttaggagaatgttcacgtgtcctttgataaaaatatttacacttatgtatgtattcacatcgccgagttggaaagcagaataggtagaagttctttataacatctgatatgcaagaatatgataattttagactttttgtcctacaaagtagtcctatggaccaaaggtggatggcagatttattactgttcttgggaattcaggatgggtgtcaaacagcgataatcatatttcattatggtctagagtaattttagaagttcattctgaaagttccagcatgtattattgattattgttctatatgaattaatcacagatgaaatgtaagatagagtggtgtcttgtacaatgagttacataaaattaaacgggtctatacaaaacttcttagtggtagaaaagaacagtaactgcaatacaccacaagagggcaaactggtactgttgaatatcagtaacttggctgcaaagagtgcaatgaaagacaaggtgatgtcagatccaagccagtttacttttctgcaatcattcaaagatcaaatcagaaagcttttctttagtaagttttgtggtatttgagaaaagtaataaggtcttactagttagtaaataaagcatactgctttttactttcattgaaaaaaataagatttgtctctaaaaatatattttcctgggttaatattgtattagatacatactttgtatcatcaccaattgtcaagaaaatttggggaaaattaaaagaaaaaattattttcttttttatcagcagtgtacagcaatatagcaaaacaagctacaaataggtgaaattggggttcactttagcagacaggagaaaggttaacaaggttaaggttaatatgataaataaattatggcagagaattgaggcaaatgaatagagattcagacagttctccctgacgcttccccttacacatgtaactaggtgattcattgtagattaaagaatgccatttgacagggcactttggctcacgtctgtaatcccagcactttgggaggccgaggcgggcagatcacgaggtcaggagattgagaccatcctggccaacatggtgaaaccccatctctactaaaatacaaaaattagccaggtgtggttgcgggcacctgtaatcccagctactcaggaggctgaggcaggagaatcgcttgaacctgagaggtggaggctgcagtgagctgagatcccaccactgcactccagcctgggcgacagagcaagactctgtctcaaaaaaaaaaaaaaaaaagcatttataaacaagactgtccattaatttttaggccctaaattgtctttttaataacgagtgcaatctgaaaatgaggttctttgtatgttgtggcctgaagataacgataaaagataaagaaacattggcaaactgcaaaatcctcacagcacatgcagtttagagtgatgctagaagtaatgtgatgtttccctattgaaagaaaacttataaatattttcactaggaatgttccgttagtccaggggttggcaacttttcctttaaagagccagataggactgggtgcggtggctcacgcctgtaatcccagcactttgggaggccgaggcgggaggatcacaaggtcaggagttcgagaccatcctggctaacacggtgaaaccccatctctactgaaaatagaaaaaaattagcctggtgtggtggcaggcgcctgtagtcccagctactcaggaggctgaggcaggagaatggtgtgaacctgggaggcagaggttgcagtgagccgagatcgcgccactgcactccagcctgggtgacagagcgagactccgtctcaaaaaaaaaaaaaaaaagagccagataataaatacttctggttttgcaggccatctggtctctgtctacttctggctactcctttttgccactgtagtgtaaaaacagtcagagacaagcaaatgaatggacgtcattgtgttccaataaaactttagttaacaaaaatagatgtcaggctagaatggcccctgggttgcagttcgttaaaccccactttagtctagctgtggaccccttcatagtaaaggagtaaatgagaaggagaaataaacttgagacttggacgtagggacacaaatagcctataactggagagcagaaggttataaaaatctccacctcaggtcccaagagatgttcaacactcagagtcttaacaagaagcaaaaattgtcttaggaaaaagcgtattttagaaaattggttgaaacacatccatagcctcatgcttaaaatatgtaaatcctgaaagtgaagtaaatctaaaaatgtatgagctggggattctgtcctgagcatcagaagcccgggcattttgagccatcaagaagtaaggaaatgcttgaatcttgcaggaaacagtagggttttgcagcaagaccattgtgggtgacaaattcgctccaaaaagcaccctcattttctgagtgtaaggaaacatcccataaattacacctcacagacatttctaaaagaccactggaaatttaaaaattttgaaaacttatttcgtcatttgtagaaagaacaaattttcaaagagtgacacatgcattctactttgatttgaaagatgagctaagtttttcatgaaatcaactaattaattgctgggggaaaaaatggcttaaaagagtatatactgcaatggtgcccaagtctggctgtaggaaaatgtcaaggagacttttgtcaatgaaaagtggcaaactctgtaaaatatttgaagagatgtattctcaggtaaatatgagtgaccaatggcctctgacacagccctcagaagattttgagaacacgcacccgaggtggtcggagtacagcttggttttatacatttttgggagacatgagacatcaatgaatacatgtaagatgtatattggtttggtccagaaaggtgggacaactcaaagcaggagaccttccaggttatatgtagctttaaagattttctgattggcaatttgttgaaagagttattatcaatagaaaggaaggtctggttacaataaggggttgtagaaaccaaggttttatcgtgcagatgaagtctcctggtagcagccttcagagaatagattgtaaatgtttcttatcagatttaaagagtctgttctgtcaataattccaaaatggaggagggtataatgaggcatgtccagctccccactcccatcgtggcctgaactagttttttcaggttaactttgaaatgcccttggctgagaggaggggtccattctgttggttgggggcgggggccttagaattttattttttgatttactttttttttttaaaaaagcaacacagcttcccagattttactccaaacactgaattggattttctggagcctgtgtgtgacacaggcatttttatgacacttcccaggtgagtcttggtagaaaccaggctagcaccagtccagggagtggtatttaggaaagaaaaggacaaagtataaaacttgggtttgattttgaccattgttggggccaaggaaaaactatttcaccctctgaaggtctggtgaaaaatcaactcacaaaaggcataaaaatctattaatgtgcacacaggggagaaccacagagcgcatgcaaggacaaagctgaactgcaacaggaatttggaattgaaagccagttccagtccctaatggggtgcagaagcttatataccatcctgaagtacagaaaggatagaggctcagagcatggccgataaaaggttacggtggtaaatcaggttatagtgataagacaggctacaagagggagagaagaggaggcctgtagcaaaggtggtcttgttatgtaggtgaaaattcacagctggcagccctccaagagggagagaagaggaggcctggctagaaaagttggtcttgttatgtaggtgaaaattcatagctggcagccctccaagagggagagaagaggaggcctggctagaaaaggtggtcttgttatgtagcagacctcagactgaatagatgatgaatgtttctttcaggcctttaaaggtgtcaaactctcagtttatctttcctagatccagacaagaaagggcctgggtgcaccgatgcagattctctacagaggtgaatcttcctcacaaaagacagctttgcaggacaacttctgtttactggctctgtaacagccatctcaaaatatgtcaactaaatatatttgcgttaaaatattttgatttccttcactatgctgagttcaaagctgcaccctgccatgtattagtcatttgtccctgagctggtgatgtactcttttaaggcttcagttaccatccccatgacatgaagccagtgtttgtccctaaggtaaggatggaaaatctgagaatgtgactctgtgtgggcttcaagtatacatgctttatctctttcacacccttctcctctttcttcctgggaacaatataactggatttgcttcactcagcaatatacagaattttactgaaaatgagagcctttggagaaaatatattattttagctttgttccattgaagcatttcttcctgaatttcctgagaactctgggtttatttattttttagacttttgattttatttatttatttattttaactctttttttccaataagttattggggttcaggtggtatttggttacatgggtaagttctttagtggtgattcgtgagattttggtgcacccatcacccaggcagtatacactgcaccatatttgtaatcttttatccctcatccccctctcactcttccccctaagtccccaaagtccattgtatcgttcttatgcctttgtgtcctcatagcttaactcccacacatcagtgagaacatatgatgtttggttttccattcctgtgttacttcatttagaataatagtctccaatctcatacaggtaactgcaaatgctgttaattcattcctttttatgcctgtgtagtattccaatgtgtgtgtgtgtgtgtgtgtgtgtgtgtgtgtgtgtgtgtgtgtgtgtatatatacatatcacagtttctttatacacttgttgattgatgggcatttggattggttccatgattttgcaattgtgaattgtgctgctataaacatgcatgtcaagtatcttttttgaataatgacttatttgcctctgggtagtagtgggattgctggatcaaatggtagtttacttttagttctttaaggaatctccacactgttttccatagtggctgcactagtttccattcccaccagcagtgtagaagtgttccctgttcatcatacccataccaaacatctactgtgttttgattttttgattatggccattcttgcaagagtaaggtggtatcgcattatggttttgatttgcatttccctgatcattagtaatgtcgagcatttttccatacgtttgttggccatttgtatatcttcttttgagaattgtctattcatatccttagcccagtttttgatgggattgttagtttttttcttactgatttgtttgagttcattgtagattctggatattaatcctctgtcagatgtgtagattgtgaagattttctcccattctgtctgtttactctgctgactgttccttttgctgtgcaaaagctctttagtttaattaggtcccaactatttatctttgtttttgctccatttgcttttgggttcttggtcatgaaattcttgcctcagccaatgtctagaagggcatttccaatgttatcttctagaattttttatagtttcaggtcttaggtttaagtccttaatccatcttgagttgattttttataaggtgagagatgaggatccagtttcattctcctacatgtgtctagccaattatcccaggatcatttgttgaaaagggtgtcctttccccactttatgttttcatttgctttgttgaagatcagttggctgaaagtattgggtttatttctggattctcttttcttttccattggtctatgtgcctatttttataccagtaccatgctgttttggtgactatggccttatggtatgagttctgctctgatcttggttatttcctatcttctgctgggtttgggtttgaaatcaagtagtgtgatgcctccagatttgttctttttgctaagtcttgctttggctgtgtgggctcttttttggtgccatatgaattttagaattgttttttctaattctgtgaagagagatggtggtattttgatggggattgcattggatttgtagatttcttttggcagtatggtcattttcaaacaatattgattctacccatccatgagcatgagatatgtttccatttgtgccatctatgatttctttcagcagtgttttttagttttccttgtagaagtctttctactcctttgttaggtatattcctaaggtttttgtttgtttgtttgtttgtttgttttgttttttttttcagctattgtaaaaggggttgagttcttgatttgattctctgcttggtcgctgttgctgtttagaaaagttactgatttgtatacattaatcttgtctccagaaactttgctgaattcttctatcagttctaggagctttctggaggaatccttaggtttttcaaggtaaacagtcagcaaatggtgacagtttgacttcctttttacctgtttggatgccctttatttctttctgttgtctgattgctctggctaggatttccagtactatgttgaagaggagtggtgagagtggacatccctgtcttgttcccattctcagaggaaatgctttcaacttttccccattcattattatgtcgactgtgggtttttcatagatggcttttattacattaaggtatgtcccttatatgccaattttgctgagagttttaaccataaagggatgctggattttgtcaaatttttttttctgcatctattgagatgatcatgtgatttttgtttttaattctgtttatgtggtgtatcacatttattgacttgcgtatgttaaaccatccgtgcattcctggtattaaacccacttgctcatgatggattatctttttgatatgttgctggattcgattagctagtattttgttaaggattttagcatctatgttcttcaaggatattggtctgtagttttcttttctggttttggtattagggtgatattggcttcacagaatgaattagggagggttccttctttctctgtcttgtggaatagtgtcaataggattggtatcaattcttctttgaatgtctagtagaattctgctgtgattccgtctggtcctggacttttttttgttggtaatttttaaattacaatttcaatctcactgcttgttactggtctgttcagggtatctaattcttcatgatttaagctaggagggttgtatttttcaaggagtttattcatctattttaggttttctagtttatatgcataagggtgttcatagcagccttgaatgaacttttgtatttcagtggtgtcagttgtaatatctcctgtttcctttcttagtgaggttatttagattttctttcttctttttgtggttatcttgctaatggtctatcaattttacttatctctcaaagaaccagctgtttgtttcatttatcttctgtcttgtctttttatttcaatttcatttagttctgctctgatcttggttatttcctctgttctgctgggtttgggtttggtttgttcttgtttctctagttccttgagatgtaaccatagattgtctatttgtgatctttcagactttttgatgtaggcatttatgactatgcagtttcctcttagcactgcctttgctgtatcccagaggttttgatagattgtgtcattattgtcattcagttcaaagaatttttaaatttccatcttgatttcctttttgacgcaatgctcattgaggagccagttatttaatttccatgtatttgcatggttttgaagattccttttggagttgattcccagttatattccactgtggtctgagagagtgcttgatataatttcgattttcttaaattttttgaggctcattttatggcctatcatattgtctgtcttggagaaagttccatgtgctgttgaatagaatgtgtgttctgtggttgttggatgaaatgttctgtgtatatctgttaagtccatttgttccaagatatagtttaagtccactgtttctttgttgaatttatgtcttgatgacctgtctagtgctgtctgtggagtattgaagtcccccactattattatgtttctgtctatctcatctcttaggtctattagcaatcgttttataaatttgagacctccagtgttaggtgcatatatgtttaggattgtgatattttcccactggacaaggccttgtacctctttgtctcttttagcagatgttgctttaaaatttgttttgtctgatataagaatagctactcctgcttgcttttggtgttcatttgcacgaaatgcctttttatacccctttactttaaacttacgtgagtgcttatgtgttagttgagtctcttcaaggcagcatatagttggttggtgagttcttatccattctgtggttctctatcttttaagtggagcacttaggccatttacattcaacgttagtattgaaacgtgaggtaccattgctttcatcatgttccttgttgcctgtgtactttggtggtttcttttttgtttttgctttttaacttgtatttttgttttataggttctatgtgatttatgttttaaagaggttctattttgatttgtttcaagatttagagctcctttaagcagttcttgtagtggtggcttggaagtggcaaattctctcaacatttgtttgtctgaaaaagactattttttcttcatgtatgatgcttagtttcactgcatacaaaattcttggctcataattgttttgtttgaggaggctgaaggtacgtccccaatcccttctagcttgtagggtttctgctgagaaatctgctgttaatctgataggtgttcctttgtaggttacttggtgcttctgtcttgtggcttttaagattctttcctttgtcttaactttggataacctgatgacaatgtggctaggcaaagatctttttgcaatgaatttcccaggtgtcctttgtgcttcttgtacttggctctctagatctctcacaaggccagggaatttttccttaattattccctcaaacatgttttccaggcttttagaattctcttcttcctcaggtacaccaatttttcttaggtttggttgtttaacataatcccagacttcttggaggctttgtttatattttcttattcttttctctttgtcagattgggttaattcaaagaccttgtctttgagctctgaatttcttccttctacttgttcaattctattgctgtgactttccagagcatttcagatttctaaaagtgtgtccaaagtttcctgaatttttattgttttttctttaagtgatctatatccatgaatatttctcccttcacttcttgtatcagttttttggatttctttgcattgggcttcacctttctctggtccctccctgattagcttattaactaacctcctgaattcttttttcaggtaaatcagggatttcttcttggtttggatccattgctggtgaacaagtgtgattttttgggggtattgaagagcctggttttgtcatattaccaggattggttttctggttctttctcatttgggtaggctctgtcagagggaaggtctagggctgaaggctgttgttcaggttcttttgtcccatggggtgttctcttgatgtagtactgtctcccttttcctatagatgtggcttcctgtgagctgaactgcagtgattgttgtctctcttctgggtctagccacccagcgagtttcccagctctgggctggtactggggtttgtctgcacagagtcctgtgatgtgaaccatctatgggtctctcagctgtggttaccagcaccttttcgggtggaactggcagaaggtgcaatgggctctgtgaggttccttagctttggtggtttaatgctctatttttgtgctgtttggcctcctgccaggaggtggcgctttccagaaagcatcagctgcagtagtgtggagagggactggcagtgggtgtggccctagaactcccaagattatatgccctttgtcttgcactaccggggtggataggctaggaccaccaggtgggggcagggctgggtgtgtctgagctcagactctccatgggcgggtcttgctgctgctgctgtgggggatagggttgaggttcccaggtcactggacttgtgtacctagcaggattatggctgcctctgctgagtcatgcaggttgtcagggaagtgggggaaagccggcagtcacagacctcacccagctcccatgcaaactgaagggctggtctcactcccaccatgccctggccaacagcccagaatctgtttccaggaggagggtgagatgggcttgaaaatttgcctgaggctatccacctcccagctgggagagaataacgctttagttcttctcctgcctgtgaagtctgcatgcctgattcgtgccctcccgagttcttgcccagaggcttcttgccctgttcaaattgttacaaagttcagctagagaattccttctccctgtagtttcaccccctgctcctctggccaccctcctgatgtgtggtcccaggcaggaactggctgcttagggacccagcgagctcccagggcctttctgctgcttcctctaccccatatttcactcggctctctaactggactcggcaccaggtaaagtcgaaaacttctccctcaaacagaacttcggtttctccagtgggtgtgtgtgtccaggagaggtggatcttcctttcccacttctatggttgggacactcacagtatttggggtgtctcccaggtcctgcaggagcagtctgcttccttcagaggatctgtagttcctctcggtgttgctggtttgtttttgcagtcaatgtatttgactttttaaaattctggtccaacgtattttaaatccccaattcatgggttataatcacaaagacataaggatgaatttgaggctctggaactgagctcctgggtctctgtcttgcctgatcctcttagctggaggcagagtcagagctctgggtttaggtcacttgagcaggtacagaatagtgtgagtgatggatgggttaatatgcctaccatctcttctcttaagcaccaggtggggagaagaccaagcagggagatgtcaagtcctcatgtcaggggcatttgaactagagtgactccatcttgaatgggggctaggtaaaataaggctgagacctgctgggctgcattcccaggaggttaaggcattcttagtcacaggatgagataggaagtcagcacaagatacagttaacaaagaccttgctgataaaatagcatgtggtaaagaagctggccaaatcccaccaatgccaagatggcgacaaaagtgacttctgatcactttcattatatgctaattgtcattacacactaattagaatgtattaacatcctaaaagacatacccaccagcacaacaacagtttacaaatgccatgggaatgtcagggcaatctaaaaaaagggggaaccctcagttccaggaattgcccacccttttcctgggaaattcatgaataatccaccccttctttagcagataatcaagaaataaacataaaaataggcaaccggaagcccttgggggtgctctgcctatggagtagccattcttttattcccttactttcttaataaacttgctttcactttatgaccttgtcctggattctttcttacacaaggtccaagaaccctctcttagagtgtggatcaagacccttttctgttaacgctcagatatcccttcaagtcttagcttgtgctgactttcttggcttaaggcaattccaaacttactgctcagaaactggctttcaattccaaattcctgttgcacttgagctgtgttcttacatgcaggtgtaggaggtttttgctcctttgttagaggttaaagcagcagtgaagtaagccacccctgctgctccttaatttatttattttttcattttctctctggtttatttgaaggaagaagaacagaacaatgttagcccctctgaatcttgagtgtggaaaattacggggccacctaccaattgttactggcaggagacgtaataagagagccaggagctggcaactctccttcctctggccaggagttttcttcttactcattagcaattatttatctgctctttggaaggaggagttgttcctccttgcacgtgctgtgctgaatgaactcaccagaaggaaaataatttcacagtgcatgttttttttttttttttttgagacggagtctcgctgtcacccaggctggagtgcagtgtcacgatctcggctcactgcaggctccgccccccggggttcacgccattctcctgcctcagcctcccgcgtagctgggactacaggtgcccgccacctcgcccggctaattttttgtatttttagtagagatggggtttcaccgtgttagccaggatggtcttgatctcctgacctcttgatccgcccgcctcggcctcccaaagtgctgggattacaggcgtgagccaccgcacccggcctcatagtgcacgtttttaaagctccctccatggtaggaaagtttttgtggaacagaagaaaattggaggttagcaatcattttattattttgttaaatgaagaaagccaggaaaaataaaattcctggtaaagaaagagttgcttcagtttactgctctggggtggcttctccagtgattctggccggtgcattaggaagccaagtttgcattttggaggttgtggactcagcatatgagtcaagtttctttgcaaagaaaacctgagggttttgttgtattctaatttataattaggcattaggcaaagtagcaatgaaggatcttacttcagcaggtttactgcttgattttgcttttggttctacttagcaactttaagtagagtaaaggaagcagctatactccttcagggaatcaagatatgacaattggacatttggatattcatgtgtttttttaggatggaacctctataaatggaatgacacttctaaggtccaaaagtaaatataaattttaaattgttcttttaaatctatgcacatttctcagaatctcagaaaaaataaacattccaagaataaaatgtgatttgtattatttctactaaaaaaaaaaaaaaactcccaagccaaataccaaagcaatgcacatctgttgaaattaggaatacagttattaaataaagctaaaaaatacacatctgaaaaataaaaggcaacacaaagattagtgacttgctactattttttatttgattttatttgcacgttagcaatcctgaaattaaaaagagtcgcaccttgaaagataaactaagtattcatggtttttattttttattttatttgtttatttttttgagacaaagtctcactctgttgcccaggctggaatacagtggtgcgatcttagctcactgcaacctccgcctcctggattcaatcgattctctgcctcagcctcctgagtagctgggattacaggcgcccaccaccacgcctggctaatttttgtatttttagtagagacagggtttcaccatcttggcctggctggtcttgaactttggacttcgtgatccacctgcctcagcctcccaaagtgctggtattataggcgtgagccactgcactcggcctcttggtttttatttttacaagatagaagttcaagggattattttgaagtgaaaataatagtgttacttttggtggttaaatgattgctttaccattccaagcacttttgacatccatggtggaggaactttgtttaagccagaagaaaggttttccatgcggctctccttacagtgctttctagagatgggctatgacacacagcgacactggttaataatagtacttccctatgagtgaacattttaagtatggttaaaaaataggtaacaaatgatgcaaaagcaatatagctgatctagctaaaatgttgctttataaaaactagatatcttggcaccatctttgcctttgtcccgtctgcctctaatctgtgaccaagttctcagtcccttcctctccattctctctgccactactttgagaaattattccttcactgtctttttccctaaactatgacaccagtttcttttttcttttttttttttttttgagacagagtctcgcactttcgtccaggctagagtgcagtggcgggatctcggctcactgcaagctctgcctcccaggttcacgccattctcctgcctcagcctcccgagtagctgggtctacaggtgcccgccaccgcgcccggctaatttttgtatgttttttttagtagagacagggtttcaccgtgttagccaggatggtctcgatctcctgacctcgtgatccacccgcctcggcctcccaaagtgctgggattacaggcgtgagccaccgcacccggccgacaccagtttctaaatgctttgctgcatttccccctatttttttttttaataattcatcctcctgaaacataaaccccaaaatgtcatccacttgctgaaaaccttggtttgcataactctctgtttgcaacaactgttttctctggggttgtccatattttgggttaagaccttcactaatggccaggactcagcccacagaaaagggagtgtcagggtttggcagatcgttaggccccagtcaagtaattaagagttcttcctgcagctgccagctttggggaagactgggtcgctgctgatgatgttgagtcaggagcccagctatgtacactgggcacatgtggggaaggatgggagaaggctggagccccagtggtcatgaactgcccaagcactcaggcaatgcacagtaatagcaggactaagcccagagcctgcactctgatggatacgagataaccagcccacttcctgcctcgttcaggaactctacaaggccaaacctattcattttatttatttatttatttagagatggagtctcactcactttgtcatccaggctgcagtgcagtggcgcaatctcggcttactgcaacctccgcctcccggattcaagcgattcttctgccgaaggtgtggtttgcccctccacacctgtgggtgtttctcgttaggtggaacgagagacttggaaaagaaagagacacggagacaaagtatagagaaagaaatacgggggcccaggggaccagcgttcagcatacggaggatcccgccggcctctgagttcccttagtatttagtgatcgttcttgggtgtttctcggagagggggatgtggcagggtcataggataatagtggacagaaggtcagcagataaacacgtgaacaaaggtctctgcatcatagacaaggtaaagaattaagtgctgtgctttagatatgcatacacataaacatctcaatgccttaaacagcagtactgctgcccgcgtgtcccacctccagccctaaggcagttttcccctatcccagtagatggaatgtacaattgggttttacaccgagacattccattgcccagggatgggcaggagacagatgccttcttcttgtctcaactgcaaagaggcgttccttcctcttttactaatcctcctcagcacagaccatttacgggtgtcgggctgggggacggtcaggtctttcccttcccacgaggccatatttcagactatcacatggggagaaaccttggacaatacctggctttcctaggcagaggtccctgcggccttccgcagtgtttgtgtccctgggtacttgagattagggagtggtgatgactcttaaagagcatgctgacttcaagcatctgtttaacaaagcacatcttgcacagcccttaatccatttcaccctgagctgacacagcacatgtttcagggagcacagggttgggggtaagattacagattaacagcatctcaaggcagaagaatttttcttagtacagaacaaaatggagactcctatgtctacttctttctacacagacacagtaacaatctgatctctttttcttttccccacattctgcttcagcctcttgagcggctgggactacaggtgtgcatcaccacacccagctaattttcatatttttagtagacatgggtttttaccatgttggccaggctggtcttgaactcctgaccccaagtgatctgcctgctttggcctcccaaagttctgggattacaggcatgagccactgtgcctggctcccattttagatattggtaacgcaagcgggtaaagactaagaatgacttactccattctctaaagtagtagttcccaacatgggctaatcatatgaatttcttgggaagattccggggacccattatgaatggtctgaatcagattacccaagcagatccgaccccaggaatatgtattttaatctagttttccaggtgattcccacgtagtcggtttgacaaggcctggggaaccagtgaataagagggggaaaatcaacattcctcaccatcacacccaaggctgtttaccaccaaagtcctatcattctgtagccattcagctttgtaggtttgttacttatttatttatttatttatttatttatttatttatttattgctcctctcctctctggtatgtgataatcctgtgcacttctgtacatttgctcatattttttgctttgatttgaatgctgtttcctatcttcttcatttgggaagaaaaatcttgtatttatttcaagttccaacgactgattcattgagagggttcccttgatcctaccagcagaattaattgcttcttttatgctttcaaaaagctttgttcataccattggtaagtatttatcacacagatttatagttataaggttaagacattctgaatcacaaaccaggacacataatcctgcaatcagaattgccccagataatgtaagatccttgattaccacagttacagttgcttgtgtcttccctgataaagtatgaattcttacaggccagagacagtcctgtattcaccagtgtaactcacacaaccttcaatatggtacaatggaaatagaaggtgtctaataaatgttgggcgtccatgtgagcatggtgctgccattttgagtgtcaagatacacttagcaccactcagaactgggagcacgactcctcttagaaggtgaatggaaagaatgttttgtctttctttttatttgtcatatttcagttaagatcaggcataaagtgtcatgtgtgtctgtatgaagacagtccaccacacaggctttgtgtgagcaacagggctgtttatttcacctgatgcaggcgggctgagtccataaaaggagtcagcaaagggtggtgggattatcattagttcttataggtttgggataggcggtggagttaggagcaatttgttgtgggcagggggtggatctcacaaagtaccttcttaagggcggggagaatatcacaaagtaccttcttaagggcaggggaatatcacaaagtaccttcttaagggcaggggaatatcacaaagtaccttcttaagggcgggggaatatcacaaagtaccttcttaagggcgggggaatatcacaaagtaccttcttaagggcaggggaatatcacaaagtaccttcttaagggcgggggaatatcacaaagtaccttcttaagggtggggagaatatcacaaagtaccttcttaagggcgggggaatatcacaaagtaccttcttaagggtggggagaatatcacaaagtaccttcttaagggcgggggaatatcacaaagtaccttcttaagggcgggggaatatcacaaagtaccttcttaagggcgggggaatatcagaaagtacattatcacaagggcagggagggtgtattgtcataggtcgattgatcagttagggtggggcaggaacaggtcacaatggtggaatgtcatcttttgtggatcttcagttgcttcaggacatttggatgtatacgtgcaggtcacaggggatatgatggcttagcttgggctcagaggcttgacataaagcatgctgggatgttagtagtactgggcctggagggtgagggagggaggaacccatgaccagctagaatggggacaggagttggatgtataagatatatacaagatccctgttctcataaaacttacattctagcaggggagatgggccaaaccaatttgaacaaatacagtatttccaaaatgataagttcttaatttagcagaggaaacagagaataagtaaatacccaaatgagatgattcaaacagtgataagagctatgaagaaaataagagataatgtctccaaaggggtctacttatcaaggggtgggggtgcaaaggggtaggattagatggggtgaagggctctcagagatgacttttgttgagagcagacataaggaaggaactagctatgcaaagagttggcaagagacagttctaggaagaggaaacctcaaatggcacaaccttgagatatgaatgagctggagcatttggggagcagaaagagacatactgtggcaagagcccagtaagtgaggagccaagctgtggggagtgtgggtggagatagacacagggcagattatatggggccttggaatattccttttatgccaagtgcagtggacagaccttggagtgtttttattttgtatttttatttttattttattttattttttttgagacggagtcttgctcttgttagctggagtgcaatggtatgatctcagctcactgcaatctctgcctcctgggttcaagcgattctcctgcctcagcctcccaagtagctgggattacaggtgcgtgccaccacgcccagctaattttttgtgtttttagtagagacagggtttcaccatgttgatcaggctggtctcgaatacctcaggtgatctgctcatcttgtcctcccaaagtgctgggattacaggcgtgaaccaccgtacctggctgctattggagttttaagcagggagtggcataatcaattctgagaaatcttaaagaggtaacattctcagaattaggtaatttctaaaaatacatctaaaggagagagtggggtgaagacgttcaaagattcaaaggtgagggccaggcgtgatggctcacgcctgtaatcccagcactttgggaggccgaggcaggtggatcacaaggtcaggagtttgagaccagcctgaccaatatggtgaaaccccatctctactaaaaatacaagaaatacccgggcgtggtggtggacgcctgtggtcctagctactcaggaggctgaggcaggaaaatcgcttgaacccaggaggcagaggttgcagtgagctgaaatcatgtcactgtactccagtctgggcaacagagtgagactctctctctcaaaaaaaaaaagaaaaaaaaaaaaaaagattcaatggtgatgctcaggttttcaacttagctaattgggtggatatgggtgctacagaaggagaaggttttgcatggaagttgatgttttattttagacatgctgaatctgagatttccatggggcatctgattgcaaactgtgtgtgtgtgtttcagacaggatcttgttctgtcacccagactagagtgcagtggtgcgatctcggctcactgcaatctctgcctcctaggttcaagggatcctcccacctcagcctccctagtagctgggactaccgatgtgtgccaccatgcccagctaatttttatattttcagtagagatggggtttcaccatgttcgccaggctggtctcgaactcttgacctcaggtgatcctcccacctcagcctcccaaagtgctgggattacaggcatgagccaccatgcccggcccaaatgtgttttttgttttttaagatggtatctcactctgttgcccaggctggagtgcagtggtgtgatcatggctcactgcagcgtcaacctactagactcaggtgatcctcccaccttggcctcctgggtagctgggactacaggtgtgtgctactaagcccagctgattttttaaaaaaaaatttttgtagagatggtggggtctcactgtgttgcccaggctggtctcaaactcctgagctcatgtcatcctcccaccttggcctcctaaagtgttgggattacaggcgtgagccactgtgccctgctgcaggtggaaatgttaagtgagaaattggatatatgtgtctgaagttttggggaaacatctcgttcaaggatatagattagagattcatcatcctataggtcattgttagaacgacaagagtggctaaaattacacagagtgtgaagcatgagtgggttgaggatgggctcttgggaagacaaatatttcaagagtggatgaagataacagtaccaacacaggatatgtggaaacaaatcaaaggaattgtctgtggacaaaaaaatgcaaagggctttctctactctctcattcagcaatgatcaacacagaaaaccacattcggtgaccaattgtgggtgcgcttttccccacacaagtgagcaatcaagttctccagtggaccgcagctggatggctccaatccagttcaattctgacactgtgtacctgagatagtgtcagatcccacaggttgagggcttggtcccacaagactggccccacttccaatgtcaatcccaagcccctggttgttctgccagggcttctgactgcctgtaaaccagggtttccacaatattgtgtcaggttcgaatcagcctagttgtgctaactctgacttaggagctgggaggtatcaggatgactcagtggccaattaaatgcttttgaattcacggtttattgtgaggctttcacacatcaacaatcatgcaaatatattcaacacacacacaagcagcaataagagagagaggggaccagcatgctgagggatgaacaggacaggtctggatttccctggaaacgccaaccagcagagtgggtgggaggctgctgcttttctccccacagcttctggtggccactgccaatggagaagaggccacagaattctgaggcagagcttcttcaggcatcttggacatggtcagtttctttgctgttttgatgtccctcctcaggtatgtccacggtcaatatcacagctgccttttggcttcccttttttttttttttttttgaaacagaatgttgctctgtcgccaggctggagtgcagtgttgtgatcttggctcactgcaacctccgcctcctgggttcaagtgattctcctgcctagcctcccgagtagctgggactacaggtgcctggcaccatgtccagctaatttttgtatttttagtagagatgggttttcactacgttggccaggatggtctccatctcttgacctcgtgatccgcccgcctcggcctcccagagtgttgggattacaggcgtgagccactgcacctgatctggcttcactttcttgttgggtctggggggtgcctggccaagcaagtgttatcttatcacctcagttcaccatacatatgcttatcactttgaggggtcagcaatttccgatttcactctgggctctcacttgtcacaagtgagtccattttgagacatgttaaatcacattatactaatgtgtatagtataattagtataatgtgatttaactataatgtgtcaatgaagagtctaactgtaaaatagttgaagagatttattctgagctaaatatgagcaaccatagcccatgacacggcctcaggaggtcctgagaacatgtgcccaaggtagtcaaggtgcagcttggttttatgcattttagggaggcatgagacatcaatcaaatacatttaggaaatacattggtttggtctattggtttggtctagaaaggcaagacaactcaaagtgggaacttccaggctataggtaaatgtaaacattttctgcttggcaatttgttcagtttgtctaaagaccttagatctatagaaaggaaatgctcaggttaagataaaagattgcaagaccaaggttcttttgaagtcttattatcatggctgcccttagagacagtagatgacaaatgtttcctattcagatctttaaaaggtactagacttttagttaatctctttaggattgggagggcctggaagaaaaagacctagctatgttaatagagattctatgttaatagagattctttacagatgcaaatattcccctacaaaggacagctttgtagggccatttcaagatatggcaaagaaacatgttttggggtaaaatatttttattttctttcttgtttcataatgttatgccagagtcaggttggaaagtaagtcacaatatatagggttaaataaaacccaagtgatgagaatttatggtttgtatggcatgacttcccagactccttagataggaatttgggcaagataaaaaaaatcagaacttagtccttaaatgttctatcacctaacttccccttgggtttgatttattcacgaactcagggaaacagtttactggttcattatagaggacattacagaatttcaagtcttattacttaagaaatacattcatgaccggtgcggtggctcacgcttgtaatcctagcactttggggcgctgaggcgggtggatcacctgaagtcaggagttcaagaccagcctggccaatgtggtgaaaccccgtctctactaaaaataaaaaaattagccagtcgtggtggcacatacctgtagtcccagctactcaggaggctgaggtaggaagaattgcttgaacccaggaggtggaggttgtagtgagccgagattgcaccactgcactccagcctgggtgacagaagagtggaactgtctccaaaaaaaattaataaataaaggatactacaaaggatacagatgaaaaaatgcatagaaaaacgtgcgggggaaggtatgcggagcttccatctccttcccaggcagtcaccctccaggaacccccaagtgttcagttacctagaggctttccaaacctggtccttttgagtttttatggaagcttcattacatggacatgattgattaaataattggccattagtgattaactcaacttttagccactctccctccccagaggtcaggaggtagagtgaaaaatcccaaccctctaatcatgccttggtcattctgtgaccagctcccatcctgaagctacataggggctgccagccatcagtcaacattagcatacaagaagtcatcactttggagagtctaaggattttaagaattgtatgccgggaaatgggtggaagatcatatatatatttcacagtatcacaaattgtttttataataaagacttaaatatgtccactagatttcatagtgtggaggcattggtgaccttggggagacaaactgattcagaaagtgaatgttgactgctttctgagaaggttggcagagaatgaaaggagacaaattacagtgaatagtaaaaggtcaatgggtttttttttagggtgggagagacttgggactatttataggctaaagagaaaaaaatcaatagaacaaaaagatggaatattcaagagaaaaagtgaaatttgaaggagtgagagcttggaagaaaaaatgaagggatttggagcagttatcttaaaataggaaggatagtttattctcttaggatgaaatgaagcaagtaaaagtgtggatgtccacatgtttgagtgcaagatgatgagttgaaaactgagggaatttactgtagatggtcccaactgttttattcaatctagttagatagtaaaatgttgccagtctgagagctcatgtgtgtgtgcacacatgtatgtagatgtatgtatgtatgtgatattgtttggatctgtgtccccacccatagctcacgttcaattgtaatccccagtgttagaagtggggcctagtgggaggtgattggatcatgatggtgctccttcatgaatggtttattgtcatcttctgggtgtcattctcatgatagtgagtgagtgaattattgtgagatcaggttgtttaaaagtgtccagcacctcccttgaccctcttactactgctcctgccatgttaggtgcctcgctccccatttgccttctgccatgagtaaaagctccctgaggcctccccagaagcagatgccagcatcatgcttcctgtacagcctgtggaaccatgagccaattaaacctcttttctttataaattgggccaattaaaccttttttctttataaattacccagtcttaggcatttcttcatagcaatgtgagaactggctaacacagaatgtgtgtgtgtgtgtgtgtgtgtgtgtgtgtgtgtgtgtgtggtgtgtacttgctttctttttttttttgaggcagagtttcactcttgttgcccaggctggagtgcaatggagcaatctcggctcactgcaacctccatctcccaggttcaagcgattctcctgcctcagcctccctagtagctgggattacaggcatgtgccaccacgcccagctaattttgtatttttagtagagacagggtttctccatgttggtcaggctggtctcgaactcccagcctcaggtgatccacccgcctcggcctcccgaagtgctgggattacaggcatgagccaccgcgcctggcggtgtgtacttgctttctaaaaaacattttacttttttactgaggtaaaatttgtgtaaaaaaaattatcattttttaagggcaggggaaggaccttaaaaaaataaatagaataaataaaaattaccattttaaagtgaagaattcagtggaatttagtactataaatcaaaagtaaaattctaagcgcctccaaccatctgaatggaccctcctctaggccaaggacattccaaagttaaactgaaaagctagttcaaggcatgatgggaaggaggagttggacatgcctcattaccattaacatcaacacagaccttaaggctgatagaccagacttatttaaaatgtataatccagggatcatggcagatggaagccaggactagattgcagcacccactcagacagacagagcagcatgtggaggcttgcatcacgaacttttgctccagaatgactgcaggaatacattaggaaagccaagagaaccagcagaccctctgaaggaagtggattgctcctgcaggacttaggagataccccaaatactatgagtgcccaaactgtggaagcgagaaaggaagatcatgcaccccagaacacatacccctgcacaagagaacctgaaggcttagattatgggagaagattctgaccttacctggagctgagtcaatttagagagccgagtgaaatacaggggtagaggaagcagcaggaaaagtcctgtgggcttgttgggttccctagcaagccatttctgccctgcctcacaggggcccttgggaagagtggccagaggcactgggaaaaggccacagggagaagaaaatctccagctgaaatttgctaacaatatgaactgattgagaagccccctggccagaactcaggggaggacatgaatccagtgtgcggactccacaggcaggtgaagaataaaagccctaattgctttcacagctggaaagtgggtagcctggggcaagttctcagtcctgttcacccactgcctggaaacacacttggtgctgttactgggggcacggtgggagtgagactggccctttgggttgtgtgggagctgggtgaggcctatgactgctggcttttccccacttccctgacaagttgcatgacccagtagaggcagccattatcctcctaggaacataactgttgatctgggaatctcaacctcatcccccacagcagctgcagcaagaccgctcaaggagagtctgaggtcagacacgcctgccactgcctctacctgatggtccttccctacctaccctggtaactgaagacaaagggcatatactcttgggagttcaagggggtggtggtgccccccaccacctgttcctccccattctactaccgctgatgctcttgaaatcaccaccttccgcaggaggacaaccaacccaaaaatagtgcattaagcaaccaaagccaaggaccctcacagagcccattttactcccccaccacctccaccagagcagatgctggtatcaatggcagaaagactcacagatggttcacatcagaggattctgtgcagacaacctccagtaccagcccagagcctggtagacttgctgggttgctagatccagaagagagataacaatctttacagcttggctctcaggaagccacatccctaggaaaagggggagagtactacatcaagggaacactccatgggacaaaacaatttgaacaacagcctttggccttagacctctgtgacaaatgagaagaaaccagaaaaccaactctggcaatatgacaaaacaatgttcttcaccacccaagaaaaaatcacactagcccaccagcaatggattccaaccaagaagaagtccctgatttacctgaaaaagaattcaggaggttagttgttaagctaatcagggaggcaacagagaaaggtgaagcccaatctaaggaaataaaaaaaaaagatacaagaagtgatgggagaaatactcaatgaaatagatagcataaataaaaaatcaaaatttcaggaaacaatagacacacttatagaaatgctaaatgttctggaaagtctcagcaatagaattcaacaagcagaagaaagaacttcagagcttgaagacaagttctttgaattaaccaaatccaacaaagacaaagaagaaagaataagaaaaattgaacaaagcctccatgaggtctgggttcacgttaaactaccaaccctaagaataattggcattcctgaggaagaagaggaacctagaagtttggaaaacatatttgggagaaaaattgaggaaaacttccctagccttgctagagacctaggcatccaaatacaagaagcacaaagaacacctgggaaattcattgcacaaagatcatcacctagacacattgtcatcagattacctaaagttaagatgaaggaaagaatcttaagaactgtgagtcaaaagcgccaggaaacctataaaggaaaacctatcagattaacagcagatttctcagcagaaatcctacaagctagaagacattggggacctatcttcagcctcctcaaacaaaacaattatcagccaagaatttgtatccagtgaaactaatcttcataaatgaaggaaaaatggtattttttagacaaacaaatgctgaaagaattcgccactaccaagccagcactacaagaacagctaaaaggagctctaaatcttgaaacaaatcctggaaacacatgaaaacagaacccctttagagcataaatctcataggacctataaaacaaaaaggcaatataaaaaaaaaaccctcaaaaaacaaaaaaaccaaggtatacagggaacaaatagtatgatgaatgaaatggtaactcccatctcaatactaatgttgaatgtaaatggcctaaatgctccccttaaaagatacagaattgcagaatggataagaactcaccaaccatctgctgccttcaagagactcacctaacacataaggactcacataaacttaaagggatggaaaaagacattccatgcaaatggacaccaaaagtgagcaagagtagctattcctatatcagacagaacaaactttaaagcaacagcagttaaaaaagacaaagagggacattatataaatgataaaatgtcttgttcaacaggaaaatattacaatcctaaatatatatgcacctaacactggaagtccctaatttataaaacaattactaatagacttaagaaatgagatagcaacacaataatagttggggacttcagtactccactgacagcactagacaggtcatcaagacagaaattcaacaaagaaacaatcagtgtaaactataccctggaacaaatggatttgacagatttatacagaacattctacccaacaaccacagaatatacattttattcaacagcacatggaactttctccaagatagaccatataataggccataaaatgagtctcaataaatttaagaaaaacactctctcagaccatagtggaataaaactagaaatcaactccaaaaggaaccaccttcaaaaccatgcaaatacatggaaattaaataacctgtacctgaatgatcattgggtcaaaaatgaaatctagatggacattagaaaattcttcgagctgaatggcaagagtgacgcaaattatcaaaacccctgggatacagcaaagtggtgctaagaggaaacttcatagccataaatgcctccatcaagaagtccgaaagaatacaatctaaggtcacacctcaaggaactaaagaaacaagaacaaaccaaacccaaacctagcagaagaaaggaaataaccaagatcagaacagaactaaatgaaattgaaacaatcaatacaaaatataaataaaacaaaaagctggttctttgaaaagataaataaaattgatagaccattagcaagcaaagactctatttttatgtccaacttttattttaagttcaggggtacatgtgcaggatgtgcaaatttgttacatagttaaatatgtgccatggtgattagctgcacagatcatcccatcacctaggtattagcctagtgttccattattggaacactaagcatgtgggagttatttatatcctactgctcaaggtcattgccaaggtctgattgattgcaaaaattcaaaaaatttcaacctcaggcataaatgggttaagcccagtaccctttacctattcttcctgatgctctccctccccccccttcccccaaccctccaacaggcccccgtgtgtgttgtttcccccatgtgtccatgcgttctcatcattcagctcccacttataagtgagaatatgcagtatttgattttctgtagaacagactcttcaagttgggtaagaaacaatctattctccctggagcctgctacttgaaggtttcacctgcataatgaaaccttggtctccacaacctcttatcataatccagaaattcctttcaattgattccaggtctttagataataaccaattgccaatcagaaaatctttgaatctggctatgacctggaatccctcccaaccggcaactgccacttccagttgtaccgccttttcaaatagagtctttgtacatcttacatgtattgattgatgtcttacatttccctaaaacgtataaaacaagttgtagcccaaccaccttgggcacatgtcatcaggatctcctgaggctgtccttaggacgggcatgtcatgggcatgtccttaatcttgtcctgaggcatgtcatgggcatgtccttaaccttggcaaaataaacttctaaattgattgagactgtttcagatactttttagtttacagtacattccaaattgctgtgcaactgccacgtgtattcagtgctaaaatattttcatctttaattggctgtggtagcacatgcctgtagttctagctactcaggaggatgaggcagcaggatcacttgagcccaggatttagaggctgcagtgagctatgattgcaccactgcactccagcccgggtgacagagtgagaccccatctctaaaaacaaaacccaaaaaacgccaccacacacattattctcatccccaaagaaaaacccatatcttcccttcagctcctagaagccactcatatatgttctgtctttatggacttatctattctgatattttctataaatggagtcacataatatatgacctattatgtctggtttccttcactttgaatagtttcaaggtttaccttcattgcagcatgtatcagaactgcattcctttttatggctgaataatatatcccatatttgtttatctgttcatttgttgatggacatttgagctgtttcccatatcatcttaactatttttaagtgtatgctacagtagtgttaactatatgcatattgttgtacagcagatctctagaaccttttcatcttgcaaaactgaaagtctataccccattgaggaatgactacttatttccccttccctccagcctctagtgaccacattaactttctgtttctatgagtctgactactttagataccttatatacatggaatcatgcagtatttgtctttttttgtgactggcttatttcacttagcataatgtcctcaaggttcatgcacttctagtatatgacaggatttccttctttttaaaaactgaataatactccattgtatgtatataccacattttctttatctagttaactgtcaatggatatttaggttgtttgctcccacctcttggctatcgtgaatattattgcaattaatatgagtgtgcataatctcttccagatcctgttttcaattgttttgggtaaatacccaggagtaggattgctgaatcacataataattctactgttaatgttttgagaaatctccatactgttttctttagcagctgcaccattttacattcccaccatcagtgcacagggtttccaatttctccacactctcaccagcatttgttattttctaatttttggataatggccattctaatagttaggaggtgatatctcactgtggtttttgatttgcatttctccaatgattagtgacattgagcatcttttcatttgcttgttggtcctttgtatatcttctttagagaaatgtctattcaagtcctttgctcacttttaaatcacgtttttgtgtttttttgatgttgagttgtaggagttcttatatattctagatattaaccccttatcagatatatcatttgcaaatattttctcccattctttttttttttctttttctcccattcttcaggatgcctttttactttactagttgtttcctttgctgcacaggagtttttaaatttgatatagtcccatttgtctatttttccttttatcacttggggttatcaggtcatatccaagaaatcattgccaaatacatgatcacaaagcttctgccttatgttttcttatagttagtcgttttatagtttcagatcttatggttaggtggttaatccatttcgaattgatttttatatatgttatagggtatccaacatttttcttttgcaattggatgtctgggtttcccaccagcatttgttgaagatactacacttcccccattgtgtagtcttggtgcccttgtcgaagatcatttgaccatacatgtgagggtttatttctgggctctctattctgttccattaatatatatgcttgtctttatgccagaattatactgttttgattaatgtgactttgtaatatattttgaaattataaagtgtgaggcctttagctttgtttgtttgtttcaggattgttttggctactcagagttctttgagattccatataaattttagaatttttgttctatttcttaaaaaaataccattgggattttgataggaactgcattgaatccgtagatagctttaggtagtatagacattttgacaatattgtcttccagtccatgaacagaagatgcttttttatttgtgtccttttaattcttttcaggaatattttgtagttttcagtgtacacgtcttttgtctccttggtcaagtttattccttagtactttttttttttttttgatgctattgtatactcagtcttagccaaaaggccaaaaggccaaatcatcctattgtaaataggatgattttctaaatttccttttcatattgtttattgttattatatagacatatagctgattttttgtgttaattttgtgttctgtagcttttccaaattcgtttattatttctaacagttatttttaatctttagtgttttctacatatggaatcatatcatcttcagaaagagatcattctattcttcctttccaatttgaatgccttttatttctttttcttccttattctggctgggacttgtaggattatgttgaatagaagtgatagtggtcatccttaccttgctccagatcttatcaaaaaaactttcagcttttcaccattcagtatgatgttagctgggagctttttatatatggcttttataaagttcaggtaattttcttatattcctagtttattaagtgtttttatcatggttttgaattttgttgaaggttttttgtgcatcaattaagatgatcatgtgattttttttcatttattctgataatgtagtggtcacattgattgattttaatatgttgaactacccttgcatcctagaaataaatcccacttggccgtggtatgtgattctttcaatgtgctgtgctgttaaacttggtttattagtattctgttgaggatttcatttgtgtttttgagacccaacacagaaggagagatgacaggaacaggatgagaactggttggaggaaggatggagattctagtccttgggcggcagttggagatggcaggtttagaagaaggagctggagaattaggaaaatagccagtcagaaacgattgacagtcaggaaaaagctgccaactggatcaaaacatttggtacaaaaacaaatcatactaagtccaggggtggtttagtagtcaaagaatcttaaagagtcagcaactgtggagttactttgtcaccaggccctgttgtagcagtctgagttaattctgacatgtatctgcagggaggctatgattaagtaacctcctttctctgactatgaaatggggttaagcaagagcttgcagtgggagataatcatcagagacttcagatgcagacagcaggagatccaggggctgggaaagccaggcagaggttcagcactcactctcaaaacctcataacttttctcattactcacctcaccctcttcttccttctaccaccctccacctttatcttccttccttctcccttctcctcctcctcttccttctctctttcttcccctccccctctttctctttcatcctttttcttccttcttgctgctatttttcttaaatcttcatggacactgtgtacagaaaatagatagggaggaactaacatcatttgtctttgctacactcttgttatctttatactctcagttccctgcagattcacatcccctccccaatatagatcaattgagctgagaggctgcaaccagaccgaagtttgttgatttttaaaaataatttatattgtatatattaaaggtagacaacatgatgttataatatacatacagatggcaaaatggttaatatagtaaagcaaatcaacatattcattatctcacttagtaacctgctttttaaaatgtgttttgtttttcttgagcaaaagcagctaaaatctattaatttagcaaaaatggtgaatacaatacaatattattaactattgtcctcatattttatattagatctctaggcttgtttatcctctatatctgccactttgtatcctttgacctacatctccccgttttctcctttctcaactttcaacctccactttctatccctagtaaccattgttttattctctatcgtatgtatttgcctttttttttaatttcacaaaataaatgagatcatgcaatatttgtctttctgtgtctggcttattttttttcttttccagctttgactttaggctgcacacagcatggagaccttgggcccggctatgaaaccactttttcctcctaggcctctgggcctgtgatgggggggtttgacatgaagacctcttgaatgccctggaaaaattttccacattgtcttggggttaacatttggcttctcatttcttatgcaactgtttgaatttctcctcagaaaatgggattttcttttctattgcattggcagtcaacaaattttttgaaccttctatgctttgcttcccttataaaactgattgcctttaacagcacccaagtcacctcttgaatgcttttctgcttagaaatttcttccgcaagatacccgaaatcatctcactccagttgaaagttccacaaatctctagggcaggggcaaaatatcaccattgtctttggtaaaacataacaagagtcacctttgctctggttcccaacaagctcttcatctccatctgagacctcctcagcctggactttattgtccatatcgctatcagcattttgggcaaagccattcaacaagtctctaggaagttccaaactttcccatattttcctgtcttcttctgaaccctccaaactcttccaacttctgcttgttacccagttccaaagtcgcttccacattttcaggtatcttttcagctacaccccactgtggtaccaatttactgtattagtccgtttccgtggtgctgataaagacataccttagcctgggtaatctatataggaaaaggggtttaatggacttacatttccacatggctggggaggcctcacaatcatggtggagggcaaggaggagcaaatcatatcttatgtggatggcagcaggcaaagggagagctggttcagggaaactctcatttttaaaaccatcagatcttgtgagactcattcactatcactataattcaatcacctccacagggttcctccaatgacacgtggaaattgtggaagttacatatcccatatagccaaatcatatcaggcaggatatgttaactgaacatttactcatgcttttgtactttcttatattcacttttttgttgttgataaagtttccttatataaatattcatctttctttgcctttgccaggggaagaggaaaaaagaaggttttggttcatgtctaggcctggagaggggagccatttagcacaaaaatttagttagcacttagccttaagagtagcctaggagagaggtgagaattcagtgggtgagggaggtctggccagagacctcttgagcatttcttcctgaccatctagagttgtctaggcacaagctcatctttgtgtattgctttgagaatttgtgtttgatgtgtcttagagtggtgaaaatacttccaatcgcacagctggtgggtgaggtaggatcaggaggagggggagaggactcttagatttgatttgccagtctgtatgttctaggaatcccaagagggagctttggacaaagtttcatatagtaatcatttatcaggtatacttgcattcagtgagtttgtttaccttagatgaactaagttggcaccccttaacaccacccctgaattctgtctaaaaagatgcaatttcacatcttggacaactgtacttgatgtgaactcctgacacactggtcaattgaaactatctgcatgtaaaacagctttgtttttccttgccctgtaatggatcatattaatacatagtcccgctcaagaccaaaactctttaggaccagcctagtgtaattcctcttggccagctctggagaggactgggctatgaatcatgcacaaaagcctaagtgaaatgaacatggacatcttcattcctgggtagtctgagtttccagtcagtttatcttccctgggttcaaggctcatttatactggaggttgtgctgggtagagaaaaacactgatgatgaacctattgcaacaatttggttgacctgggaggtagactggcccatgataaattaggatgacctttagattcttacaggcaattgataatgatgtttacattccagaaaaggcctaaaaggttatcttccagaccttcttaaaaagtgttgactgaatttgaggaaatctctaagagacttctgagcagctacaatagtcaggtggtcaaataacacaccaatctcaaacataataaaagcttctctgccctttgaagcagaatttggagtgttctggtaaaacaactttctcaatgctctctgtcatatcttgttttctttttaacatctcttaattttatgtctttcttttctcaattctcagattgccaaagagaatatttgagatctcatagactattttttttgagacagggacttgctctgtcacccagactagagtgcagtggcatgatctcagctcactgcaacgtccacctcctgggttcaagcagtttcctgcctcatcctcccaagtagctgggactacaggcacaagatgcccagctaattattgtatttttagtagagacatgtttcaccatgttggccaggctggtctcgaactcctgatttcaagtgatccacctgccttagcctcccaaagtgctgggattatagatgtgagccaccgtgcctggcctcatagactaccctcaacaacaaatgtggatacccatattttctaggggatgatggttgggagggatataatcaaggatatttatcctaatcattacaggttctggctaagagcctttactagagtaattcctcagtttcagatcaaaattttaaactaattattggcgttgctttttggatattggaatggcattcccctatgagcttcctagggctaccataacaaaataccacaaaactgggtggcttaaagcaacaaaaatttattctttcatggttctagaggttggaagtctgaaatccaggtgttagtaggattggttcattctggaggatgtgagaaagaatttgctctatgcctgtcttttagcttctggtagcttctggcaatccttggcgttcatgacttatagacacatcacttcaatctctgcctccaacttcacatggccatctccatttatgtgtgtcttcagggagtgtcttcaactccctttccccttatgaggacatcaatcataagatttagggcctattgaagtttatagcattgaatgcctacacaaaacacacacaaaaatagacagatcacaaattaacaacctaatgtcacatctcaagcaactagaaaaacaagaacaaaccaaacccaaagctagcagaagaaaagaaataacaacgatcagaggagaactaaatgaaattgagaccaaaaacaaaacccagtggatcaatgaaacaaaaagtttgttctttgaaaagatgaaattgataaccactagctagactaagaaaaaaagaagagggcagatccaaataaacacaatcagaaataaaaaagaagatattaccgctgagaccacagaaatacaaaagatcatcagagatttataaacaactgtatgctcacaaactagaaaacctaaagaaattggataaattcctggaacatacaaccttctaggattgaactgggaagaaatagaaattatgaacagaccaataatgagtagtgagatcagtaatgaaaaaccctcccagcaacaataaaaaaagaccaggactgaatggattcacaggcgaattctaccaaatgtacaaagaagaactggtacccatcctccagaaactgttctaaaaaatcaaggaggaggaagttatctctaactcattctttttaattttttttttcttttccttgagatagaatctcactctcctcctgggttcaagcaattctcatgcctctgccgcccaaatagctgggattacaggtatgtgccaccatgcccggctaatttttgcattttttttctttggaagagacagggtttcgccatgttgtccaagctagtcttgaactcctggcctcaagtgatccccctgcctcggcctcccaaagttctgggattatttaagtgagctaccatgcctggcccaattccctaactcattctatgaggccaggatcaccctgatactaaggccagacaaggacacaacaacaaaagaacctacagaccaatatccctgatgaacgtagatggaaaagtcctcaacaaaatactagcaaacccaacccaacaatatataaaaaagataatacaccatgatgaagcgagttttattccaggggtacaaagacagttcaacacacataatcaataaatgtgattcatcacataaacagaattaaggatgaaaaccagatgattacctcaatagatgcaaaaaaaagcatttgataaaattcaaaatcccttcataataaaaacacttgacaaactagacacagaaggagtatacctcaaaataataaaggcagtgtatgacaaacctacaaccaatattatactaaatggggagaagttgaaagcattccccctaagaactggaagaagacaagtatgcacacttttacctctcttatatatcataatactggaagccttggccagagacataaggcaaaaaaaaaaaaaaaaaaaaaaaaagaagacattttttggaaaagaagtcaaattatttctgttcactgatgatatgatcttatatctagaacatccacaagactccaccaatatctcttacacttggtaaatgaattcagtaagtatattggtccattctcatgctactataaaggactacctggctgggcgcggtggctcacgcctgtaatcccagcactttgggaggccgaggcgggtggatcacgaggtcaggagatcgaaaccatcctggctgacacggtgaaaccccgtctctactgaaaaatacaaaaaaatcagctgggcgtggtggcgggcgcctgtagttccagctactccggaggctgaggagattggcttgaacctgggaggcggagcttgcagtgagctgagaccacgccactgcactccggcctgggcgacagagcaagattccctctcaaaaaaaaaaaaaaaaaggactacccaagattcggtaatttataaagggaagaggtttaattgactcacagttcggtatggctgtggaggcctcaggaaacttacattcatggcagaaggggaggcaaacacaaccttcttcacatgatggcaggaaggagaagtgccaagcacaagggggaaaagcccctgataaaaccatcagatctcatgagaactcactcactatcacaagaacagcagcatgggggtaaccacacccatgattcaattacctcccaccaagtccctctcacaatgcgtggggattatgggaactacaattcaagatgtgatttaggtggggacacagccaaaccatatcagtaaggtttcaggatacaaaatcaatgtgcacaaatcactagtatttctatataccaattatgatcatgctgacaaccaaattaagaaggcaatcacatttacagtagctacaaaaaaataaaatacctaggaatatatttaactgaggaggtgaaatatttcttttttttttttttttttttaaatttatttttttattgataattcttgggtgtttctcacagagggggatttggcagggtcatgggacaatagtggagggaaggtcagcagataaacaagtgaacaaaggtctctggttttcctaggcagaggaccctgcggccttccgcagtgtttgtgtccctgattacttgagattagggagtggtgatgactcttaacgagcatgctgccttcaagcatctgtttaacaaagcacatcttgcaccgcccttaatccatttaaccctgagtggacacagcacatgtttcagagagcacagggttgggggtaaggtcacagatcaacaggatcccaaggcagaggaatttttcttagtgcagaacaaaatgaaaagtctcccatgtctacttctttctacacagacacggcaaccatccgatttctcaatcttttccccacctttcccgcctttctattccacaaagccgccattgtcatcctggcccgttctcaatgagctgttgggcacacctcccagacggggtggtggccgggcagaggggctcctcacttcccagtaggggcggccgggcagaggcgcccctcacctcccggatggggctgctggccgggcaggggggctgacaccccccacctccctcccggacggggcggctggccgggcggggggctgacccccccacctccctcccggacggggcggctggccgggcagaggggctcctcacttcccagtaggggcagccgggcagaggtgcccctcacctcccggacggggtggctggccgggcaggggggctgaaccccccccacctccctcccggacgggcggctggccgggcggggggctgacccccccacctccctcccggacggggcggctggccgggcagaggggctcctcacttcccagtaggggcggccgggcagaggtgcccctcacctcccggacggggcggctggccgggcaggggggctgaccccccccacctccttcaggacggggtgtctggccgggcgggggggctgacccccccacctccctcccggacggggcggctggccgggcagaggggctcctcacttcccagtaggggcggccgggcagaggcgcccctcacctcccggatggggctgctggccgggcaggggggctgaccccccccacctccctcccggacggggtggctggccgggcggggggctgacccccccacctccctcccggacggggcggctggccgggcagaggggctcctcacttcccagtaggggcagccgggcagaggtgcccctcacctcccggacggggcggctggccgggcaggggggctaaaccccccccacctccctcccggacggggcggctggccgggcggggggccgacccccccacctccctcccagacggggcggctggccgggcaggggggctaaaccccccccacctccctcccggacggggcggctggccgggcggggggccgagccccccacctccctcccagacagggcggctggccgggcggggggctgaccccccaacctccctcccggacggggcggctggccgggcagaggggctcgtcacttcccagtaggggcggccgggcagaggcgcccctcacctcccagacggggcggctggccgggcggagggctgacccccccacctcctccggacggggcggctggccaggcaggggctgaccccccccacctccctcccggacggggcgactggccgggtgggggggctgacccccccatctccctcccggacggggtggctggccgggctgaggggctcctcacttcccagtaggggcagccgggcagaggcacccctcacctcccggatggggcggctggccaggcggggggctgacccccccacctccctcccggacggcacggctggccaggcggggggctgacccccccacctccctcccggatggggcggctgccgggcggagacgctcctcacttcccagatggggtggctgccgggcggagaggctcctcacttctcagacggggcagctgccgggcggaggggctcctcacttctcagacggggtggttgccaggcagagggtctcctcacttctcagacggggtctcggccgggcagaggcgctcctcacatcccagatggggcggcggggcagaggcactccccacatctcagatgatgggcggccgggcagagacgctcctcacttcctagatgtgatggcggctgggaagaggcgctcctcacttcctagatgggatggcggccgggcggagacgctcctcactttccagactgggcagccaggcagaggggctcctcacatcccagacgatgggcggccaggcagagacactcctcacttcccagacggggtggcggccgggcagaggctgcaatctcggcactttgggaggccaaggcaggcggctgctccttgccctcgggccccgcggggcccgtccgctcctccagccgctgcctcccgggcggccgaggtgaaatatttctacaaggaaaactacaaaatattgatgaaagaaattgtagacgacacaagcaaatggaaaactatcttatttaatggatcagaagaattagtatcattaaaatgaccataatgcccaaaacaatctacagatttaatgcaatttccatcaaaatgccaacatcgagtttcacagaattggggaaaaaaatcttaaaatttatatggaaccaaaaaaaatcccaaatagtgaaagcaatcctaagcaaaaagaacgaagctggaggcatcacattaactgacttcaagctacacaacaaagctacaaaaacaccatggtactgatacaaaaatagacacatagacaagtggaacagaatagagaaggcagaaataaagcagcatacctataaccaattgatcttcaacaaagtcaacaaaaacaagctaatggaaaaaggatccctattcaataaatgatgctgggaaaactggctagccatatgcagaagagtgaaacaggacccctatctctcatcataaacaaaaagcaactcgagatgaatcaaagacataaatgtaagacttgaaactataaaaatattagaagaaaacctaggaaaaactcttctggacattagtctaggtaaagaattcattactaagacctcaaaagcacaagcaacaacaacaaaaatagaaaaatgggacttaattaacctaaaaagctgctgcacagcaaaataaataatcaacagaatgaacaatcttcagaatgggagaaaatattcacaaactatgtatccaacaggggactaatatccaaaatttacaaggaattcacatgactcaagaacaacaaaaaatccaagtaatcccattaaaaagtgggcaaaaaccataaaaagacatgtcttctcgaaagaaggcatacaaatggctaacaaacatatgaaagaatgctcattatatcactaatctcagaaaaatgcgaattaaaaccacaatgagatatcatctcacaccaataggaataactattattaaaaagtaaaaaaaaaaaaaaaaaaagatgttggtgaaaacgtgaagaaaagggaatgcttatacacttctggtggcaatataaattagtataacaattatggaaaatagtatgaagaattcgcaaagaactaaaaatagaactaccatttgatccagcaatcacactactggatgtataaccaaaggtaaagaaataattatatcaaaagatacctacactcatacttatcttagcactgttcacaataacatatgaaatcaacctaagtgtccatcagtcgataattagataaagaaaatgtggtatatacacccagcgtaatactattcagtcataaaaagaatgaaatcatgtctcttgcagcagcaaggatggaactggaggccattatcctaagtgaagcaattcacaaatagaaagtcaaggccgggcacggtggttcacccatgtaatcccagaactttgggaggctgaggcaggaggatcatgaggtcaggagttcgagaccagcctggccaatatggcgaaaccccatctctactaaaaatacaaaaaaaaaaaaaaattagctgcacgtggtggcaggcacctgtaatcctagctactcaggaggctgagggaggagaattgcttgaacccgggaggcagaggttacagtgagccaagactgtgccattgcactccagcctgggcaacagagtgagactccatctcaaaaaaaaaaaggtcaaataccaaatgttctcagttataagtgggagctaaatagtatgtatacatggacatggagtgtggaacaatagacattggagacttggaatggtggggcgtggtggtgacagatgagaaattacttatgtacattattcaagtgatggctatattaaaagcccagacttcaatactatgtaatatattcacgtaacaaaactgcacttataccccttaaatttataaaaagaaaaaaattagggcctaccctagtcgaatatgacctcatcataacttgattacatctattgtctgttatgtttcgaaataaggtcacattcacacgtaccagggattaggacttcaacatatgtttttgggaggcccacttcaactcatagtagtccccatcaacaattccaaagcccaaatcatgatctcacccttaaaactctgcgtcaaactttccattcagttcattcattcatttattcagcattgctaggcttaattgttggtgccaaaataagacagtgaaaatcaagaaaaaccatgaaaatcatttgtgcaagtctgaaagcattttatatgttatcacatccgcccattcccaaatccaaacaattatcaagtcttgctgacttcattttttgaatacgtctcacatccattcctttttttttttttttccaattccacctctaccttcatctctggagtccaaattctcatattctcctgcctggacatctgtaatagccttctaaatgcgaatcacatttaattctcattctgtctaatgagttactactctaaggttagatttcctcctacaacctccctccctgcccagacttaaaacacttcaatgattttccaatatttttagagtaaagccaaacttgagttgggcacagtggcacgtgcctgtagtcccaactacttgtgaggctgagtcaggagcatattttgagcccattcacttaagcccaggagtgtcaggccatcctgggcaacataactcatctctttaaaaaaaagaataaagccaaactcctcaacatggctgatgaaactctgggtggtggactttacccacttgtctagcctcggctcacaccataccccacccctcacttcctcagctccaaccacattggtcttctttcagtctctcaaattttaaaatgtgtacagattgctagggaatcttgttaaaatgcagattctggttaagtcaatctggaattgtgcctgagagtctgcgtttctgattagctcccacgtggtacaaaggttgatggtccaaaactctgtttgaatccgaaggtttgccagtttccgtgctcccttggcatatgcttttgcacatgttcctggctttcctcaacactctttcctcctctcttcacttgaacccattgttcagatctcaattattatctcttctcgtggaagtcttctctgaccttcctgactaggccaaatccccccaatcccagtgcgaagtctcagggactctgtctctccttagcacttagcatagttgagttctatgttttctgtgcacatttttaaaatcatatatttgtctcccccaagaccattggctccatgatggagtgtctgtttctgattgccatcgcatccccagaatccacatagcatggggttttcagatgagacacttaataaatatttgttgaggcacttggatctctcaggtcgcccacttggccctcttccaattgtacgttaattcctgccacttgtggtaaaagcttttttttttttttttgagacggggtctcgctctgtcgcccgggctggagtgcagtggcgccatctcggctcactgcaagctccgcctcttcggttcacgccattctcctgcctcagcctcccgagtagctgggactacaggctcccgtcaccattcactcctgctctaaaatttgccttggtcacttcctctgttttatgcccctctgccgaattctttcctcttaggaggcaagaatcaagtttgttgcagactctttggattcgctgctgccacatgacttggatacgttccgtagtggtaagacacctctatcccttgccttctttggctggaggcatttcacccctgtgtgtggtttccttaaaaatgaatggatggatgaataaataaataaataaataaatatttgttgaatgaatgaatcagtggtaccgagttcttaacagccttttcttttactaacagggtaaaaggatgatttaattaagttgccctgtggatgtttagactctctataagaaaatggctttggtttccccagactgttcagcagagattctgctgcttctattctgggttgcttctgatgttgttaacaacctttgcacacactctgggtttgtttctgccttgtggctgctgagctcagatggtgacctggggttaataaaatcatgtctctgcaagcaagagagagcctctctggttatttcaaatagcgggggcttgattgtaaggttgtatgtggaaattaggtagatgggatcttagctgggtaggcagtccactcagacaacagagcactacaaggttgcctggagttaaatgcagctcttgaggcagctcttgtcactgtgtcaatatcgcaagttgattgctctctggtgtctggctccaccactaagacagctcagctgttcttcctgtccctggattacttggagtatccttcaatttctgtttttgccactgcttgttctctcccaatatgaagtgctcgttcacagtttccatcactttctggtttctgtggcatcactgcatctgctggctgccttcttagcttttactccctggtgtctgctgctcgtattctccatataccttgcattcaaattttattgctttgtttaatcacagtgtagtctttttctgattcttacgccacaagcctaggccactaacaggcccatatcatcatatttgctgcctatgagcttgatgctctcctggtccaagcaggtctgagaaggacagtatgcttacatgcagcagcgtgctggagatccccaagagatgattgttaaatatttaggaaattgatgagcccagttaaacagctggtagcttgaaatcagccaaagtaggaaaatttacaccacagaaattggcaaaggatatatatgtcggggccccatttttccctacagagccagtttcccaacacatgaatagaataaaaaacaaggctccactccaaggaagcattcagagccatttcccttggttatgtggttgctattccaaggcttccctaatggggcagtatgatcagcaagtcccttacatggctagttcagtctaacatggtcactcccaggacttccaaagtagacacagacacctttcattgctgttgctacccaattgctgctatacttatgttttagaatgagtttcttgggaaacaaagtctgagatgagaatttgtgtgcagaatcttattagggagtactcttgggttcaactcttagaggggagtggaggtacgattatacaaagggaggagttcagctgtgatgcagtcaccaaaaaagacatcaggcaattccatcaggaggaccagccgttagatgagggctgagggctgcctgtcggagcagctctcttcagaatagagtgagtcccagggagaaactctgggcggagaaccatcagccaccaacactcccagtgcctgggggaatgagcgtctcagttttgaaggggaatctgtacggctcatgcatattcacttatatgaagggaaaaaagcgtaagagttattaaagtttctttagaacatattaaagttgttttcattaagttcttgagcaggaaaactttgataatttgacaacaaatctctaagggttgtaattctacttctatatctttctgtttttctgagccctcatctcctgaaaacatggtgaccccagtttcctcaccaggaggatcagaggacaaaatcactgacatttcatagtatcacacttacctatcttaatcttccgtgcttaactctgcccttctctccactcagggcattcctgtctccagcattaggtgtaacagactcaggattacatagtgcttatgctgcagactttttccctttaccttcacatccctccatcctggcattggttttaatgtttctcacccctccctttctggcaggcctcttgtacttttttgtaggttgacttgccaaattacagatttggtccttccaagaagtgtgaccttggagaaaccttggcagatatggcactttaaggatggttacaagttctttgactttctttccatcaggagattggatgggggtgggacgtctatggccttttgccttgaaaatgtgtggctcagtgactgctttaacagtagaaaatggcggaaataatattgtactacctgttgagctcagcctttaagaaattagcaggttctattctggttcttagaaaactttctttaagagccctaagccatgtgagaaatgcaactacctgaggcctcatgccagagaggccagcatgggtgctctggtccatggccccagctgagcccagcctgccagtcatccctgccagtgtgccagacacgggcatgaagccgcattggatcctccgcacaacatatctgccagccaaatacctgagcaacctcaatcaatgccgcatggagtggaaaaatcacccaggtgagtcctgcctgaattcctgatacacaagatcttaagatataataaaacaagtcccgctttaagctgctaacatttgaattgatctattacacagcaataaatcatggaaacatcaggtacatagcattctaaatcactgaccaagatgatgctggtattttttttctttttctttttctggttttttttttttttttttttttggagacaaagtcgtgttttgtcacccaggttggagtggcataatcacgactcactgcctcaacttcccaggttcaagtgatcctcccacctcagcctcctaagtagctgagactacaggcacgcaccactacacccggctaatttttgtatgtttttgtagagacagcgtttcaccatgtttcccaggctggtcttgatctcctgaactcaagtgatccacctgccttggcctcccaacgtggtggtattttcttcataattgtttaatgaatgctgcaactaagtgtcccaaaatgtattgccaatttaaatatgtagttcaaacttcactgagaaactaagaggctaagttctctttctgttatctgcctggacataaagacgtatgtttggagatggcagcctttttttctgttagatgagtagatatggagagtgccaggcactcttctttgtgttttctcccctcttttccctttcccttggattatagtccttttgatccaacttatatataaccttatagaaacgaatagagggttaaaagctgtggtgtttggggcctccttccctcctttcagaacacagtgtaatcctaggacttacgccatttaccctttgggagatgtatctctccacaaggacagagggttagattttcaattcttggggacaataagtttattcatttgaagcaaagctccaaaaatctgaccttgctaagaagatgctattatccgatctccttccactggggagaaatcacttttcaataaaaaatttctattgtttttacaaagagagaatataatttttactaaattacaatgaacatgatgtagactttatagaaggaaataggattgagaaattatccctaaatgaaatcagacaatgcacaaagagaacataacttgtgcatacagaggctttgttcctgtgagccttgctattgtaaaatctcacgtagtcaaagaagcaaagatacttcaagcagaatcctgagaattcttgtaatttgctttctaattctgcattccctgcccttccctggtgtgcttttaggtaagcatggagaagatgaatgaacacgcagggaaatagaacagaaatgttaactacactgttcacaagagtaactcaatcacactttcttatgtgcattagaattatagagatgaagagggatttcattccaatccctcttttactcattaggtaaaaggaggcacagagaatttaaatgacttgttcagaatcacatagccagtttttgttacattgggattagaaaaccagcaattgtttgtactatgactacatcaactcctactttaataacaatatttatcctttccagagtatttgttgacctctatctaatatagggtactgtgccagtcattggttatgaggagctgaataagacagagacagccctggcatcatggaacttactcaaagcaatctggtgggacagtaaaaaatggtactattcaatgcggtatggtgctcataagatgacaatcaaattaaacttttcttagcatagtcttacttattgaactgatgggacagccagcatagtttcctttaggatactctgattccctaacattctaaggggagaaaatttactcttggatcctgcttttattaaagaagttagagattaagtttacagacttttttctgttactttgcggcaagatctgtccttgttctcacagaagcctggaggctggttagtcactctcagttcttcctgctaaggttgagtcctataaacgcttgttagtctaatttagttgtcaaggagggccactttttacccagcctcttttggtttaaactctttgtcaagcagaactgattgaaacaaatagaaaggaagacaagttgctattttaatatagaacattttggtttgttagaattagtatctggaaaaagattccagagcaacagaaagatgcgactcagttatacttcctgcataaacatctaagcagcaacaattgagtaagaaacacatgtaaagacaagatgggatgggaatgtattaggataagccacatggaattccctatatgcaacaattttgacctacaaaaatggcagtgttctttaattcaaatatgttctattgcatgtatcaaaatcagttcgatttagtaaatgttcacgtttatttctgagcaagggccttgggtaattttatctctgcatgactcagtttccttatttgaaaagttggtataatagatgttgtttatttatttatttactgttaaaaccaattcggccaggcgcggtggctcacgcctgtaatcccaccactttgggaggccgaggcaggtggatcccgaggtcaggagatggagaccatcctggctaacacggagaaaccccgtctctactaaaaaatacaaaaaatgagcctagcgtggtggcgggcgcctgtagtcccagctactcaggaggctgaggcaggagaatggcgtgaacccgggaggctggagcttgcagtgagccgagatcgcgccactgtactccagcctgggcaacagagtgagactccgtctcaaacaaaaaaaaaaaaaaaagagagagagagagagaaaaagcttaagcttgtaaatttgatgcaatcccatttgtctgtttctgcttttgttgcctctgtgtatccaataaatcattgcccagatcaatgtgatggagcttttcccttatgtttccttccagtagctttatagtttcaggtcttatgtttaagtctttaatccattctgagttgatttttgtatgtggtgtaagacaagggtccaatttcatttttctgcatatgagtgtccagttttctcaacgtcatttattgaagagactatcctttttccattgggtgttcttggcacctttgttgaaaatcagttgactataaatgcatgggtttatttctgtgctctctgtcctgttccattggtcaatgtgtctatttttatgtcagtaccatgctgttttcagtagcacaggatccagctaagactctgggaggagccctaagaatgtgattacatcatcacatattgttgtaaactttacaagagaaactacaatcttcagactggtgcaatctctttcctttctgacttccccttcatcatggttcacctcatgctgggtgacattggtcatttttggcaattggctgagggaagttgagttgcggatgcatttagacagagcagaatacatttgggggcttctggtcacttccatgtatggttaagttgtggctagttgttccgaggtgggagtaattcccagatgtgtctcatggaatctggttctgttagcagaagagaaagaaagcttggaatggagggcattagaaactagtttggggaaaatttttccggtcatcaaatgtgcaaaattgcaagcaaagaattcgcttgtttttgaagcctcattaaagtggagcttcccttttgcagcacattgtaatgataagtaccccatttttccttttttgatggggatccgacaaaacagaatttactataattcttgtgtttataaagtaaaacgagtcatagaaatacaagtacatctaaatgtgaagttactttttaaaaataaatcccaactataatattagaaaagcaatttcagtcagtcatattaaaactaattttttaactccttttagaaaatatgaaactgttaccatataaatatatcaatgaatatgtagcaaaaaatgtaacgtgaaaagtattatgtcaggcagaataaaaacatcttatttttcagaatttcttggtatctgtggcttttatcaacttctaactttttttatttttaaatattttatttatttatttatttatttatttatttatttatttatttatcttgagaccgggtctcactctgacacccaggcaggggtgcagtggcatgatcttggctcactgcagccttgatctcgggggctcgagtgatttcccacctcagcctcctgagtagctggggctataggcccatcaccaccacatctggctaatttttttttttttttttttttgagatggagtcttgctctgtcacccaggctggagtgcagtggtgcaatctcggctcactgcaagctccgcctcttgggttcacgccattctcctgcctcagcctcccgagtactgagactatgggtgcccaccaccacgcccagctaatttttttgtgtttttagtagagacagggtttctccgtgttagccagaatggtctccatctcctgacctcgtgatccgcccacctccacctcccaaagtgctaggattacaggcgtgagccaccgcgcccggccacacctggctaattttttgtatttaattttttaattgctctgattttatttatcatataagtatttccctttatacttaattttagattaataattgggtatttttcttaaagagggtctctaaatcatgtataatctttagttcctacaaaacctggattgaatcttgaaaagatcagatagatagtttttctaaggtcacatagcaattgacaaaagaagccaacagagcacagagcagctgtgctatctttggccttctgcccagtaccttagtctttctctagctttaagagaaatgttaaacacagtgccacactggatatgcattccagaaggtattcacgtatttaaattgatgtcacaaaatacatgaacatcagaaggatgtgacccagaaagaaatgattaataattcaatatttttattaaacggcaaatttagttataggaagatattaagtaaaataaaaaattagcagcatttactgtttgttttacttttatatgtagatgagtagagtacaaatgtatattcaacaggcaagaggcatagcatcaaacctgaaatcagaaggtcttgattaaagcctcccttccacttctaagatgcctggaaatatggtagatttggttaattgtccccataattatctctctttttcttcttgagttgtagccccccagctggactacattccccagccttctctaggttaggagtagccatgtggctaagtttggttaatgggttgcaaattaaaatgatgtaggcaattgtgtacaatgtccttaactataagaccctgcttcctaatctttcctcttctctctgggctggcgtgcagatgtggtggatcctgtttttgcctaatgacatgggcaaacccaagaacagcaagatagcagcctgggccctcaatttcatgacatcttttgactgtttcaggagagaaaaataaggaataattttttttgagctattgcattttcgaaatcttcttgtaaaaatagcttagcttgtgccctaaccaacacagtgaaatatgggcaagtcaccacctctcaaaacttccatttcctcacgtgtaaaataagggcgataatatcaagcctggcaacacatgtagctgttctgagtattaaataaaatcatatagatcagagacgaatacattgcgtaatataaaatgttattttatattttagtattgcagctgccagaggggagaaaataagatgaaggttttatttcttattttgtacataaacattttattttagaataagctaagattaatagagaattagcaaaataagtagtgagtttctgtatacccctcaatcagtttctctaatgttaaccatttacattctcatgacagatttgtcaaaactaaaacccagcattggtactttactacgcttaggttatttggatgtcactagtttttccatgaatgtcctttttctcttccaggatccaatgcaggagataatattgcatttgttgccatttcttttagtctgttctgttccgaatactttctcagtctttctttatttgtcatgatcttgacaaattcagggagtactggccaggtattttgtagaaggtttctctgtttgagtttgtgttttcatgattagattggggtgatcgaggtggggggatgtgtattagtctgttctcacattgctgtaaagaaatacctgagactgggtaatttataaagaaaagaggtttaattggctcgtggttctgcagaccgtctgggaagcatggcagcttctgcttctggggaggcttctggaagattcctgtcatggcagaaggcaaaggggagccagcgcttcacatggccagagcaggaggaagagagaggagggaggtgccacacacttttcaacaagcagatctcactattgcaatgacagctccaaggggaatggcgataaaccatgagaaactgcccccatgagctaatcacctctcaccaggccccacctccagcattggggattacatttcaacatgaggtttggacggggacacagttccaacccatactgggggaggattttatttttaatgaaaagggtaattcggaataaaaatgcagtgtgtgtgagagaataaacctcgtttttcaatttgattgccttatcaactctaattgctgttctaggtagtgtgcccctcttgtagagtagaattgcttactcaagttccatgaggtacctttgagaatcaccacaatgcattcagcctcctgtttttgtcctggtacctctggagaagactgagctgctctctgctgcttccttgtcacagtcattctggaaagatgtctaaaaagcactgggttgtgaatctggaacttgataacaggtagaccagtgtctagtccagttgaacagaaaagagtatattttagaaaaactgtccattgacagcttcgtaccacagtgaactgatcagcaaatcctcaacacattgggacggttttattgttattgttttgttttttttagagtgagggagggaggttagaaggaagggcgagagggaaagaggaacagaggacaattaaagcaaatgtgaattatagatgagaaaagagatgggacttggtgaatttagaatcttaaggaaaactctaggtgaagagggagactaaaatcttttcttggatgctgacctatagtttgactccccagatacaataaggagaaagcagtattttgattgggacaggaattaacctatttctttctatatttacttttcaagttgagcaagatctgggaaagggcctgctagcatattttgtttttactatttcaaacaaagatatccatcttgaatggcattagactttcaaaaaaatttagtgtgttatttctttctggctatccaaggtcttgattatacaaaattcccatcagaacacccacacactctctctctctctctcctatacttaagaaaaaaatctaaatagagaagactatgactgaagagagcttaattttgattaaatttcggggtccattctttcaagagctctttcagctaaatgctcaaatccaatctgtgggtagctctcagtatctgtctttctttgaaggtccggctctgcaaatcttgtcctggcctccaaagacaacatctcagaggccacttggtgtatttcaacttaatctttgtccacacactcctttctctacacttggctttcctctgaccatatatctttatactgaccattatttctctacttctcaataatccccctgcccaactctctcttccttcagcctcacagcccagtcttcaccacactctgctgaaccttctttttttttgagacagagtcttgctcaatcgcccaggctggagtgcagtggcacgatctccgctcactgcaagctccgcctcccgggttcacgccattctcctgcctcagcctcccgagtagctgggactacaggcgcccgccaccacgcccggctaatttttttgtatttttagtagagacggggtttcactgtgttagccaggatggcctcgatctcctgacctcgtgatccaccctcctcagcctcccaaagtgctgggattacaggcgtgagccaccgcgcccggcctgaaccttcttaaatgcatgtctgttccatccatttctttctatctctattggcagggtctggtacaagccactactgcttttctcctggactaattcataatctccaacaaagctagagtgttatttctgagacataattctctttgtatcagttctacatgctttaagcttttcattggcttcatttttctttccttgagggcagtcaaaattctggagaaaattgctgataatagatgtagccctgttagatctggttcacccttattttcccggtcagagctcgttgcattccctcctgctgtccttattcgccatctctccagctgcttttcccccttgtccttcccatctctctccaccactgacactgtagtcactcgttttagtccctggaggattccctggttttgctttctcttctcaaggctttcagtcaacactctccaaatccccctccttttcctcctttaggatactatgctctcgttcaacccccaggaaaatcttcctgacctcctcttctactaatttaggttggttttctccactgtgtgtccatagaactctaactttccctttagtaaatcatccttttttgtgattgttcatgcgcttgtttgtatttctcttggtatttaactccttgttaaatagtttgtaaataaatttcttaaccatttcaaagatgtacacatcctagaacctctcatgaaccacattacagaggaacagaagattcatttgagttatgaaatatggcaagtaaatggtggaaggatctattacctgttgttgttgtttttgatacggggtctctctctgttatccaggctggagtgcagtggtgtgatcatggctcactgaagcctccaactcatgaagtgattctctcacttcagcttcctgaatagctagtactataggtgtacaccaccaggcccagttagtttttaatgctttgtagagattgggtctcactatgttgcccaagctggtcttgaattcctagatcaagtgatccccatctcagcctcccaaagtgctgggactataggcatgagccactgcgtttggccctggttttccttcttagtgcacaagttttcttttactacatacatattattgatgactgctccatattgcactgtaaaatagctgcaacctataggaaaatgtagcagtttctttttgatagtatactcggaatttaattttctctattcctcttacctaccctaagcgagggcccatagtagaaggcactggatgttgtagtttaacaagttatgatacttatgtagagaattaagcatgcctgggattactcacagaaaaatgactggctgtaaccgacaacctcgattttgttatatgcctgcagaagtagttatattctttttttttttttttttttttttgagacagagtctcacactgtcacccaggctggagtgtagtggtgcgatcttggctcactgcaacctccacctcctgggtccaagcgtttcacctgcctcaacctcctgagtagctgggactacaggggcgtgccaccacacccagctaatttttgtatttttagtagagatggcgtttcacaatgttggccaggttggtctcgatctcttgacctcgtgatccacccgccttggcctcccaaagtgctgggattacaggcatgagccaccagtgcctggccagtaatattcttaaattgatatccaaatgcagttaactgtaacaactgtgagaagggttgcatgcttccagaacgatgaattatacatgaagagaaaagtacaattgtcaattttggtagaaattttaaaaagatttagaatctctgatttagatgtgataaaggtttcttctaaacacttgactcttatgttgaagccttcagtgtgtctacacttaacatttctattcctttgccttccattttcgtgaatgttgatatgtttgattatgagtctctcccctttgaaaacattatgtattttcccttgacaatttctagaggaatagtcttcattttaagttataaaactggttttaagtttaatcttgacaaatttccttttggagctagaaatctagatgttgttctttggaagctattgaatataattaacacatttctgtcatctctacatatatctactcacatttagagataaagtgcaattatacctatttatagtgttatgtaactaggagcccgagttttatcccaactgaacatagtgtattgtggaaaaacgcataagaatgtttctgtgtttttatcacggctatgattgacttgctctgacagtctatcctcctaataaatgcaatattactgctaaaatgtccccattcggcagaaatgcataaacaaggaagggaagtaatgtaattttagtttatatttacctttgacttgtggttcccagttttggatggcggccacaaaaagccaagcaaattcccaggacgccaggccacaaggcagtttccggcaacagcaagtgattgcagctttcttagaactttgcaaatataacttcttcataacaagtatttaaaggcaaatagagttacattctcttgcttatgaacacctatcttataaacatctgttaaaagaaaagctttagacaaattaaatgtaacagcatttaattgagcaaagaactatttgtgcgtcgggcaatcctcagaaccagaacaggttctgaaagactcctgaggctgccacatggctggttaatgtttacaggcaaaaaaaaaggtaattgaagaacagaagatggaaggagggatacagacggctcagccagttaaagcttggtatttgcctgttgaacctggtttgaatagctggccacctgtgattgactgaagctctgctgccgtgattggccgagactcagctatttgttacaaaggcaaattcctaagtcaggttttcagttggtttccctattaagttaagttgcaggttgtcatgtagggctcatatggagacttctaaagcttaaatttagtttgatttaacatatctcttatgtgcactttcctgttgctgctgccatggtgctcccctccctccctggtgttggggactttcttattctgttggtccagctgacaaaatcctgtggctgttcatacccttcacacatgcctgccacctccccctttcctagtgccactgctggcgctaattggtcttgtcacccctcttttcttgatgctggagcagagttgagtttcataactctgggcttatggacattccagatagagcatgaactggaactctaaacgtgttttcctttgggaattcacatggtaaaccaccttattcattgtggagggttgaatgggttttttcctctgccttagaactaaatcgtcacatgataatggttgtgtggaaagtgtgttaaacactgacttaggaaggttggatagtaatttgtgaaaaactggaattgcctgggcctccagcactattcatatttatgtagtatctatattaatatagtaacaaaatggattatgattttaagaaatgtatcagttttgaaacaagcaaaactactattgtatgagtagtgtaggggcagaaagatgtgatccctttttttttaaatcaattataagggtaacaatcaacagtcctataacaaaaacaggtttacaagagaaaagcataacaaatttatttaacccaagttttatgtgacacaggacacttcagaaatgatgactcattgagctggggaaaatggcctacttttatgcttaggtttgatgaagaatggacagccacgtagaaatgtgattgaacaaaaagagtacatctagtggtaatagactgagagaggaaacatagcaagatctgtctgttcagattcttctagatgtctctgggtagcatttcccctgaaccccactgtatggggcagaactcctctggaatgagggtcttcaaggaagaaaggagaaggcagagagtaacctttctgggttttatggtttgctttgaagagaggttctagtttctatgacacaccttaagtaagagaaaaatcctggggttggtgtgatggctcatgcttgtaatcccaacactttgggaggctaaggcaggaggatcacttgaggccaatagtttagaaccagccgagcaacatggtgagatcctttctctatttaagtatattttttaaaattaaagattaaaaaaaggaaagaggaattctggtttctattacttgctttgaagcagaaagagggatgggagacaggaggtcagagagatttttggttctgcgctgcttctgaggtctttccattttctttagttcaaagtactcagcataccacaatgccatactttggggcatcattgtctgagtttgcgaaatagtatagcaatcaactcaaaagtaaaacacaaggttcggtcgactggcatttgagtagccctgtcccatgtttacaaaagtgttggaattctagaattttgccaaaggatactcatgtgacaaatgcagaatcaagatgactgggaataattttcagtttgacctttcccttttaccactcccatctctaaaacacacacatttggaaagcagatttagaaatattcaatgttttgtcaggttatctatgcttaaaaatttatttttaaaggaaatgttgtctattgagcctgaatcactatgctcttcaggaatttagtaagaagtaattggatgtgaaacagaaggtacaggtggttggggagttcctgtgacttcaggaatgaagatgaatttcattaattaaaatgaaatactcaaagtggaaatcacacaggaaataaattgttagaggaaatagaaacttctttggtaagaattaagtgattaagtgactgaaaatggtctatcatataaccatataattatatggatattttttctttgatgaaaggaaaactggtgatttggggactaaaaatgggggaacagagtggggagaacaagctaggtataggaaggatttttattctgcagccaaaatcttccaattgatgccttatccttttgaaagaattatgaggattacattttctctaaaagatgaagtttcagtacatgattcatgtcttttactattcgacttttacactctaaatttattcacttaataaaagcagctctacagaagggtaccttcaaaagtatcaggagaattataagtagcaagaagatgggacaaactgagaagaagcagggcagggagggaacgagaggagctgagtgcagaaaagaaattacttcttagtacagaaacgtctgttcacagaagagaaaaaagcgggaggggcaccaagcttacagaaaggaaatcaaagtcaaaataccatgccaagctaaagagaaggcatgattcagaatccaggaaactaagtctggatttaatgaatttaattttcaaagattcaagtgtgtatcaagagactcccacagaaaaaggccaggaagggtaaccagaattccaggctagcagaactcagttccaattatggagtgcctgaaaaacacaccatgggccaaaaactcttctgggttcatagtgcagaagacacagtcagagaggtaagttggcatgtgtgggtgtctaaaggtttaagtgacagaagggacaaacaggctaaggtgtgagtaggcggaggggaagaaaatatctctttttctactcatcttaggttcatgggtgaggcccctataaggcccttggctccaaaaagttttgctgaaaattatcaacataaggcaaattgattaataaaagaaaaggcatacaaatttatttaacatgtatacaagagagctttcagaatgaagaccaaaagatacagaagaaattgtccatttttacgcttaggtttaacaaattatggacagccatacagaaacaggatggaacaaaaagagtagattctaatgttagtagacagagcagaaaacccggcaagccctgtatagattcttctcagcctctctgagcaagcattccgttcttctcagtatggggaagggccctctctggaatgggatcttatgacctacagtcaaacaaggtaggtcagatagtttctttatggctagttttacatagaaaggtggagggaatattagaataatagttttaggttttatgactaatttgggggagaagggttctggttctaagacccaccggaaggacgaaggattctagtttctatggctagccttgggaaagaatgggactgagagatagcagggcaggagaaggtcagagaaaaacttgcctctgaggctgctgctgaggccttcattttgggctgttgttttctgatccacaacattccccattgtgaaactttcccaagaagtttcatagttcagaaatagagttgctggattgtcttataagctgttaaaccagtttttcagcccagagaataggccagtccagttaaatagttaacagtgaatcaggcagtgctgttgttgatgggctttccccaaagtcagtcctctatgtgatttgagcaattggatatttagtaagaagaacttctgtgcatatcaaagaaaaaccagagttaatggttagaacaaactataaactcagttttttagtccagaggtcagccagttgagaggatttttagatgttgagcttgaagcatgttcagatgaagtcagagaagatagtggcaatctagtttgcagtttacatcagatattccaggaaactttctgtgcagtcaatacatcaacaagcatgaagactgttcagatatttagttgctatagtgatttctcttaaaatttatatcaagttgtctagcttcagctcgtggggctttaggaaaaagcagttttaatttcagtgattccaagtcagacatatggggaaaaatgagaaatattaggtatagacttgtaactacaggagagttcaggattgagtccaaattgtagataaacaataaaaactgaaaagcaatagatgaggttataatctaataatagctgtactatagtttttttctgaaacataatttctttctctctggtttcccatttttactaaggatgaatcacaatacaaccaatttatttgtaaaacaagttttactcttattatacttggcctgatgatttgcataaagtgcagcaagaatagtgattggtcatataggctcctttaaattggctttgctgaaacttttaaaatatgaaacctcaaattagacttttaaaagaccctctaggtcagccaagctgataatttatttgtgcctgcagatacccgtataaattgggtaaattcttctcttcttgagttcccaaaataacttgaggttcctgggccggtcaagaaagtgacattctttacttaccacaggtcagaaattttgtaaagaaattgcttaggcaaggtaagaggccagtattttgaaggggttttttatcagttctattaattcacttcagttcctcaaagcagtctggtcatatgccactccagtcaaagccttggtaaaataaccagtgtttccaattgtgtcctgttacaaaagaaaacagattcttattgaatttatgcaaataactatattgccttaaattaagaatactcacaaatcatttcaaattctggagaaatctggtagagagaaagaaaaatgctttcattttgcttgcaaaagtatattttacccaatttgttgtaagttataaatagcttcaaagaaaaaaaagttctctttaccctggaaaaccaaacattaatagaatcagcaatgtttctaacaaaaaaagtcattaaatttatttcagacaatatgaataatcataccacaaagtaccaaaaggtataccagagtcactacaccaagaccagtcatatgcaaatgtttttcttccactaatgaaaactttgcagaggagacaagtggtcattttcattggctgcccaaccagattatacatagagaaaggctgggagtctgactggtagaaaaattcttatctttttgctggcttgtcaggttcttgggttctcatctttgtagcttctagaagagcagagcaggtttgatgatcccgtttgtaacaccaaactacaggagccaaggccgttggccccctaaatttttgctcgaaatctctgacgtgaggcagactgattaataaaataaaaatttatttattttttaagacagtgtcttgctctgttgtccaggttggagtgcaatggcatgatcttggctcactgcagcctcaacctcctgggcttcagtgatcctctcacctcagcctcccaagtagctcaggccacagggaccatgcctgactaattgtttatattttttctagatatggggtgtccctatgctgcccaggctagtcttgaacttctgggctcaagggatcctcctgcttcggcctcccaaaagtggtggcaatacaggtgtgacccactgtgccccgcttcaaatttacttaatgggtataaatgaatcttcagaatgaagagccaaagatagaggagaaattgtccatttttatgtttagatttaacagttagatagccatgtagaaatgtgattggatggccaggcgtggtggctcacgcctgtaatcccagaaatttgggaggccgaggcgggcggatcacttgaggtcaggagttcggggccaggcactgtggctcatgcctgtaatcccagcactttgggaggccaaggtgggtggatcacgaggtcaggggatcaagaccatccttgctaacacggtgaaactctgtctctactaaaaatacaaaaaaaaaaaaattagccgggcgtggcggtgtgtacctgcagtaacagccgctggggaggctgaggcaggagaatggtgtgaacccgggaggtggagcttgcagtgagctgagatcgcaccactgcattccagcctgtgcgacagagtgagactccgtctcaaagaaaaaaaaaaaaaaaaaaaaaaaggagttcgggaccaggctagccaaaatagtgaaatccctactaaaaatacaaaaattagccgggtgtggtggtgggcacctataatcccagctacttgggaggctgaggcagaaggattgcttgaacctgggaggtggaggttgcagtgagctgagattgtgccactgcactccagcctgggtgacagagtgagtttgtctcaaaaaaaaaaaaaaaaaaaaaaagaaatgtgactcgacaaaaaggatagaatctaatgtaaataggctgagtggggaaacccagccagccccgtctgtctagattcttctcagcctgtccgagcacacattcctttcttctggatatggggcaggatcctttctggaacggggatcttatgacctgtagtcaaacaaggtaggtcggataatttctttgtggtcagtttttacacagaaaggcagagggaaaattagaataatcgtttgaggctttgtaactaactctggggagaaggggttctggtttcttttttttttttttttttttgagacggagtctcgctctgtcacgcaggctggagtgcagtggcgtgatcttggctcactgcaagctccgtctcccgggttcacgccattctcctgcctcagcctcctaaatagctggggctacaggtgcccaccaccatacccggctaattattttgtatttttagtagagacggggtttctccgtgttagccaggatggtctcgatctcctgacctcgtgatctgcccgcctcggcctcccaaagtgctgggattacaggcgtgagccaccgcgcctggccaggggttctggtttctaagacccaccgtggggaagagggattctagtttctatggctagtctccagggaagatgggactgagagatagtagggcagagaaaaacttttgcttctgaggctgctgttgaggcccttatttgggggtgttgtattctgagccctaacattaataagagaaaagccataccaattaaagttttacatgacgtgggagccttcataaggaaatgaagacccgaagaaacaaacctgaagctttttacagtaggtttgatcaagagtagacaatcatggagaaatatgataggacaaagatggtttaaactaaatgtaatcaatggaggaaaacttagtaaagtctatttgttcagattcttttttgtgtctctgtgtcttcagatataaggatgttccttcctgtgggtatggggagggtgttacgacctgttccagggaaaaagggtagggcaagatcagagtgacctttctacttctgtggttttcttaaattccttcagctttggggtaacatgtgtttaaccccaccatgggaaagtggacaacagtatcaatggcttctaattcttacagtaaaaatgtctcataaatattacataaaatctggctttaaggaaggtaaaattggatttatccaacactgttacagggaagcatttctaatgattcaaggggacaggaaactgaacaaatgatattggcaatgttgaatatgtgtccaggagctcactgaggagggaacttggcttagtcatctcggggtctttaggacctagagcttagccctgacttatagcttcataaagtgtttactgttccttataagatcctttaaaattcttccttagtgaccatgagaaggcagtttttatcttcccagaaacagatttgaataatttaaaaccagttgtagccaccgtggggttgtagagtatcgaagttaacagttgaggggctgaattcaagctgcagacaaattaatttttttggtctttatcagctcagattgtaaaacattaaatttagattcccttggaagagaagtacactctccagttttaaactttccctgcactctcttaaggttcaataatttggatccctggaacaaactgatagtaggcagattcacagaaggaaaagcatacagttcattacttgcaattgaacagaagcctcacaaaatataagagtcaaagaaagaccagatgactaaagttgttatgccacacagaaaggaattgaagctagggtgccctggagggtggtggcaacaagctatgggggcaagaggaggaactgtacagcgagtaaaagctgtcttattatgcagatcaagtctctatggcagcagccctcagaagaatagatgatagccagtggtacaagtttctctgaaggaggtatcagactattattctctttctgtgagttaatctttcgtggttgctatttttctgggggaacttccctgagtcagataaggcaagatcagagaaaacccttacctgcatttgctgctttccaggtgctctcagtttgagttttaaagcggcatatttgagggtatcattttctgagctgcaacacaagtgtttcttattatatgacaattgttttgctagccttatgcctgaaggcactggagtttgaccctttctcaatacctgagaaacgaagaagcgcagctagctgagtgagctgatgtaaaaaacccaaaatcagtgttttcaagcttgcatcgctacatcaagtggcttcctaaactaggggaagatacttgcatcttcttatttgttcaatttgcctctctggtttccagttgccctattagcaggcaatctagaacctccttcttaatgacccgctccagccaggtaggtcctatttgcaaacaccagattttccaggcaccgttagacactgatggcaccactggcttacaaaattcttttggtgcacctcccaggcttagggattattttccaaacacaactgctgaggccagattctgggcctggcctgtgtgtctagcatcaatttcccactgtgctcaaaccagtgtttccctctcacccaacaacaacttcctatacctttgtctggggagctcagacttggagtatatcaggaagggaacaggcatatgatttggatacagcaccacattctttcttggaccctggtccccagctagactgaccttgcctccaggtgactgttttttgttttttattttttctctttttcttttcttttttattttatttatttatttattattatactttaagttttagggtacatgtgcacattgtgcaggttagttacatatgtatacatgtgccatgctggtgtgctgcacccattaactcgtcatttaacattaggtatatctcctaatgctgtccctcccccctcccgccaccccacaacaggccccggtgtgtgatgttccccttcctgtgtccatgtgttctcattgttcaattctcacctatgagtgagaacatgcagtatttggttttttgtccttgcgatagtttgctgagaatgatggtttccagcttcatccatgtccctacaaaggacatgaactcatcattttttatggctgcatagtattccatggtgtatatgtgccacattttcttaatccagtctatcatcgttggacatttgggttggttccaagtctttgctattgtgaataatgccgcaataaacctacatgtgcatgtgtctctatagcagcatgatttataatcctttgggtatatacccagtaatgggatggctgggtcaagtggtatttctagttctagatccctgaggaatcgccacactgacttccacaatggttgaactagtttacagtcccaccaacagtgtaagaatgttcctatttctccacatcctctccagcacttgttgtttcctgactttttaatgatcgccattctaactggtgtgagatgatatctcattgtggttttgatttgcatttctctgatggccagtgatgatgagcattttttcatgtgtcttttggctgcataaatgtcttcttttgagaagtgtctgttcatatccttcgcccactttttgatggggttgatttttttttcttgtaaatttgttggagttcattgtagattctggatattagccctttgtcagatgagtagattgcaaaaattttctcccattctgtaggttgcctgttcactctgatggtagtttcctttgctgtgcagaagctctttagtttaattagatcccatttgtcaattttggcttttgttcccattgcttttggtgttttagacctgaagtccttgctggtgcctatgtcctgaatggtattgcctaggttttcttctagggtttttatgattttaggtctaacatttaagtctttaatccatcttgaattaatttttgtataaggcgtaaggaaggcatccagtttcagctttctgcatatggctagccagttttcccagaaccatttatcaaatagggaatcctttccccatttcttgtttttgtcaggtttgtcaaagatcagatggttgcagatatgcagcattacttctgagggctctgttctgtttcattggtctgtatctctgttttggtaccagtaccatgctgttttggttactgtagccttgtagtatagtttgaagtcaggtagcgtgatgcctccagctttgttcttttggcttaggattggcttggcaatgcgggctctttttttggttccatatgaactttaaagtagttttttccaattctatgaagaaagtcattgatagcttgatggggatggcattgaatcatctataaattaccttgggcaatatggccattttcacaatattgattcttcctacccatgagcatggaatgttcttccatttgtttgtatccccttttgtttcattgagcagtggtttgtagttctccttgaagagttcctttgccaaccttgtaagttggattcctaggtattttattctctttgaagcagttgtgaatgggagttcactcatgatttggctttctgtttgtctgttattggtgtataagaatgcttgtgatttttgcacattgattttataacctgagactttgctgaagttgcctatcagcttaaggagattttgggctgagacgatggggttttatagatatacaatcatgtcatctgcaaacagggacaatctgacttcctcttttcctaattgaataccctttatttccttctcctgcctgattgccctggccagaacttccaacaccatgttgaataggagtggtgagagagggcatccctgtctcgtgccagttttcaaaggaaatgcttccagtttttgcccatgcagtatgatgttggctgtgggttggttctagatagctcttattattttgagatacgtcccatcaatacctaattcattgagagtttttagcatcaagggttgttgaattttgtcaaaggccttttctgcatctattgagataatcatatggtttttgttgttggttctgtttatatgctggattatgtttattgatttgcgtatgttgaaccagccttgcatcccagggatgaagcccacttgatcatggtggataagctttttgatgtgctgctggattcggtttgccagtattttattgaggatttttgcatcgatgttcatcagggatattggtctgaaattctctttttttgttgtgtctctgccaggctttggtatcaggatgatgctggcctcataaaatgagttagggaggattccctctttttctattgattggaatagtttcagaaggaatggtaccagctcctccttgtacctctggtagaatttggctgtgaatccatctggtcctggactttttttggttggtaagctattaattattgcctcaatttcagagcctgttattggtctattcggagattcaacttcttcctggtttagtcttgggagggtgtatgtgtcgaggaatgtatccatttcttctagattttctagtttatttgcgtagaggtgcttatagtattctctgatggtagtttgtatttctgtgggatcggtggtgataccccctttatcattttttattgcgtctatttgattcttctctcttttcttcttcattagtcttgctagtggtctatcaaatttgttgatcttttcaaaaaaccagcccctggattcattgatttttttgaagggtttttttgtgtctccatttccttcagttctgctctgatcttagttatttcttgccttctgctagcttttgaatgtgtttgctcttgcttctctagttcttttaattgtgatgttagggtgtcaattttagatctttcctgctttcttttgtgggcatttagtgctataaatttccctctacactctgctttgaatgtgtcccagagattctggtatgttgtgtctttgttctcgttggtttcaaagaacatctttatttctgccttcatttcgttatgtacccagtagtcattcaggagcaggttgttcagtttccatgtagttgagcggtttggagtcagtttcttaatcttgagttctagtttgattgcactgtggtctgagagatagtttgttataatttctgttcttttacaattgctgaggagtgctttacttccaactatgtggtcaattttggaataagtgaggtgtgatgctgagaagaaggtatattctgttgatttggggtggagagttctgtagatgtctattaggtccgcttggtgcagagctgagttcaattcctggatatccttgttaactttctgtctcgttgatctgtctaatgttgacagtggggtgttaaagtctcccattatcattgtgtgggagtctaagtctctttgtaggtctctaaggacttgctttatgaatctgggtgctcctgtattgggtgcatatatatttaggatagttagctcttcttgttgaattgatccctttaccattatgtaatgaccttctctcttttgatctttgttggtttaaagtctgttttatcagagactaggattgcaacccctacctttttttgttttccatttgcttggtagatcttcctccatcactttattttgagcctatgtgtgtctgtgcacgtgagatgggtttcctgaatacagcacactgatgggtcttgactctttatccaatttgccagtctgtgtcttttaactggagcatttagcccattgacatttaaggttaatattgttatgtgtgaatttgatcctgtcattatgatgttagctggttattttgctcgttagttgatgcagtttcttcctagcctcgacggtctttacaatttggcatgtttttgcagtggcttgtactggttgttcctttccatgtttagtgattccttcaggagctcttgcagggcaggcctacctccaggtgactgttgaccctgacagaattttcctaacttcaaggttctgggaacagagtgggactgttgatatcttccttcccagaaggctctagattctttatgtaagccaatccatttcctcccaagagacagcttggttaccttgtgtttccttgaatcactagacctttgctggaataacaaaaactctttttcatgctctggagccctgcacccacgccatcaggcctattctctccacatttactaattaagaaagatcactcaaatccttcctgcaatggagaagacttgcttgcttcctggtgactttccctaatttatttttaaaccacgtcaagcatcctgttggctcctgcacagggatcctactgcattcacatttttcacatggaactttgtgtggacttagaagacagaaactcgtacataaataattcacaaagaaagacgataggatctagtaatgtgggcaaattctgtgaaatggttacctgaattataaattataagggtctataaagtctcagttttcagaaggcttttaccaaatccaataattaagtgcattgccagaactttctagattctgagctgctttccaacagggtcccatttatgctcctttctatttcatacataatttaaaaatctcaaagaatgtaccctgggaatattctaaatacgagtggccagatcctgtccaataaaaaaaaatgattttaagatcggttctaccaatgtgactccatctgattgaattgagaaagtgatcacatttggtagtagggcagcccttttactaaattataaatatgttaactaaatggtactgcatccaaatactgcatccaaatcatatgcctgttcccttcctgatatactccaaatctgagcttcccagataaatattcaatgaaaaggctttaagcacagagcttctcctactggccatttaaacaatgaggtgtaggaatgtttcaggagaaatgtaggcatttatgattttaattgactgtttttcaattttaactcatagcagacttaattgtggcctaagttgcatgtgcccactggagacacttcctgttttttaaaatttttgttactttaaaaatattaatgaatccacctggctagaaacacctatacaatctatccagtgagcaggctcctttccacccctgtcctacgctgccttagttgtcaccatctttccaatagggtaacatttattccattaacttaagagattttaaatttatgtgtgtgtatatgcatgcatgtatgtatatatgtagattgttgggagttcaaaacacaataccccaaagtatggtgttttggcatgctcaatactttaaactgaaggacattggaaaggcctcagaaccaaggtctctctgaccctctgctgctctcctgtcttccacccctcttcctcccccaaactgagttatagtaaccagaatttctcttgcccaaggtggatcatagaaactagaacccctctcttccaaatcaagccataaaacctaggaaggtcactttatcccttttctcctgagaccctcattccagaaaggtcctgccccatacccaggaggatggattgctacgtggagaagtcaagaagaatctggacagacaggccgggctgggtttccttcctccatctactaccattaaatcatacccttttgtgcaatcacatttccacactgctgtccacacttcatcaaaactaagcataaaaagaaacagttttccctgggtctttgggttttcatttctgaagactctcatgtcatataaaactttgattaatgcacctgttatgccttttccttgttaacctgtcttttgttatagaaatgtcagcctgataattggtgagaaaatgtatcatacctttctgcttctacaacatacacatatgtgaacatatatacatgtgccttgtatgtatgtaggtacatatgttgtgtgtgtgtgtctggaggaggtgagggagggagacaggaatacaaatagggagtgggagagaaatagaaatgaactcggttaatatataagcagatactaatgttacttttctgccctttttacgcaaatggcaggcagcatcctataccgattattctacatcttgttttatttcatatttattactatatcttgaagataattatataacagtacataaatggcctctgtattctttttatagctgcatagaattttgagttgtttccaattttacataattacaaataatgctttatatgacgtaataactgtgacatatattatttgacatatgctcaagtacttctgtagaataaaattttgaaattggaattgctaattccaaaggtatattatgaacgtttttattcttgtagatgtctaattacattctattagtaaatatgccaagttacagccccactagcattgtgggagtgttgactttttccacagtttaatcaacacaatgtatgttcaaacttttgagtttttatccatttagcaggaaaaagtgagcaacctaatgtagttttaatctgtatcacttatgggtgagattatacaagtttttcatatagttaagatccttttatatttccttttttgtgaattattctttatcgtttatttatcactttaaatagcatttttcttatttgttgaaacatactttatattttagagatattgattctttgtctacaatataaacttgcaatatcctttccaatttgtcatttagttttctttttgcttataggtgtttattttttattttttggttcgttttggtttttacacaaaagttttgattatagagttgagtttatccattttgtatagcttctcgataatggattcacagttggaaatgtctgcctatttttatttttatttatttatttttttagtacgttgatggcctcctttttttttttttttttttgatacaggatcttgctgcgtcactcaggctggagtgcagtggcacaatcacggctcattgcaacctcgactccccaggttcaagcaatcctcccacttcaacctccaaagtagctaggactacaggtgtggccatgcctagctaacttttaaaatttgttctagagatggggtctcactctattgcccaggctggtcttgaactcctgagctcaaatgtcccaccaaccttgtgctcccaaagtgctgggattatgagtgtgagccactgcatctggtggcttcctttttttaatcccaattttttattccttaaaaatttttccaggtgtacattgtaaaatttgttttctattttaccatttttccaaatggctacccagttgtcccaacagcatatattaaatattctatcttctctattgatgtgaattgccatccttaacatttactaaatttgcttattattgattgattttggagaaggggtctcactttgtcatacaggctgaagtgcagaggtgtaattacaacccactgcagcctctaccttctgggctcaagtgatcctccccactcagcctcctgagtagctgggaccacaggcatgtgccaccatgactggctaatttttaaattttttgtagtgataaggtctctctatgttgctccagctggtctccaactcctgggttcaaggaatgctcccacctctgcctcccaaagtgctgggattacagacatgacccaccgtgcccaggctgcttatttttatttttatttttttgagacaagattttgctctgtcacccagcctggagtgtgtagtggcatgatctcagctcactgcaccctcgacttcctgagctcaggtgattctcccacctcagccttctaagtagctgggactacaggcccacatcaccacgccaggctaacttttgtatttttagtagagacaggatttcagcgtgttacccacgctggtctcaaactcctgggctcaagcaatcctcccacctcgggctccaaaaatgctaggattacaggcgtgagccacccagcctggcctgcttatgaattttggtctagttttagacatcctattctacaacttggctagtctgtttattcatgtatcagctgttttaactattaaggtgttatatgtcctatctagaagggccaatcctcctgtgttgctcttcattgttataattttcctggttgtttttgcttatttatcttttcaaatgaatgtcagtgttaacttgcctggtttaaaaaaccgtattttattgaagttgtattaagagaataaaaaactgtggataattaaaatttttatggtatcaatttttttctcattctaacaaaaagtatgactttcctttttttttttttttgtcttgcgatggagtctcactctgtcgcccaggctggagtgcagtggctcgatctcagctcgctgcagctgtgtccagaactggtgggttcttggtctcactgacttcaagaatgaagccgcggacccttgtggtgagtgttacagttcttaaaggcggcgtgtctggagtttgttccttctgatgttcggatgtgtttggagtttcttccttctggtgggttcgtggtctcactggctcaggagtgaagctgcagacctttgcggtgagtgttacagctcttaaggtggcgtgtctggagttgttcgttcctccctgtgggttcatggtcttgctggcttcagaagtgaagctgcagaccttcacgatgaatgttacagctcataaaggcagtgtggacccaaagattgagcagtagcaagatttattgcaaagagcaaaagaacaaagcttccatggtgtggaaggggaccggagccactgctagcctgggcagcctgcttttattctcttatctggccccacccacatcctgctgattggtccattttacaaagagctgattggtccgttttgacaaggtgctgattggtgcgtttacaatccctgagctagacacaaaagttctccaccaccccactagatgataatagatacagagtgttgattggtgtatttacaaaccttgagctagatatagagtgccaattggtgcattcacaaaccctgagctagacacagggtgctgattggtgtgtttgcaaaccttgagctagatacggagtgctgattggtgtatttacaatcccttagctagacataaaggttctccaagtccccatcagactcaggagcccagctggcttcacccagtggatctggcactggggtcgcaggtggagctgcctgccagtcccgtgccgtgtgcctgcactcctcagctcttgggtggtcgatgggactgggcactgtggagcagggggtggtgctcctaggggaggctcgggccccacaggagcccactgagagagggggaggctcaggcatggcgtgctgcaggtcccgagccctgcccggcagggtggcagctaagacccggcgagaaatccagtgcagcgccggtgggccagcactgctgggggacccagcccaccctccgcagcctcctggcccaggtgctaagcccctcattgcccgggctggcctgccagcccgctgctccaagtgcagggcccacggagcccacgcccacccagaactcgcactggcccgcaagcatggcatgcagccctggttccctcctgcgcccctccctccacacctccccgcaagctgagggagtcggctccggccttggccagcccagaaaggggcccccacagtgcagcggcgggctgaagggctcctcaagcacaggcagagtgggcgccaaggccgaggaggcaccgagagcgagtgagggctgtgagggctgccagcacgctgtcacctctcacagcctctgcctcccaggtacaagtgattctcctgcctcagcctcctgagtagctgggattacaggtatgcaccaccataactggttttgatcgattctttttttgtgtccttgagagggttttaaaattgtctacctttagctcttgttcatttcttattaagataatttctaagtattctataatttttgttgctattgctggggcttggaatgcaataccccatagtatggcaccttggcaggctgaatactttggactgaaggaaattggaaaggcctcagaagcaagctctttctgaccttctcccatcctcctgttcctctgtctcccctaaatctaagtgagtcttaaaaaccagaattcctcttccccaaggtaggtcataaaaacttgaacccctctaccccaaatcaaatcataaaacctataaatgtcacactctcccttctcccttaagacccttattagatgcaggtcctcccctatatctgggaaaaaggcatccttcacagagaaatcaagaagtatctgaacagagaggcctgctggtgtcccccctgctgtggtttggatatggtttgtttggccccactgagtcttatgttgaaatttgattccaatgttgcaagtggggtgtggtaagagatgtttgggccatgagggtggatccctcatgagtgacttggttccattctcacaggagtgagttctcactcttagctcccaaaacaactgtttgttgaaaagagcctgataccgcctcctgtctccctcttgcttcctgtcctggtgtgtgacctctgtacacttcgggttccctttgccttctgccgtgagtagaagcagcctgacgctcttgccagagcagatgctagtgctatgcttctggcatggccagcagaactgtgagccacattttctttataaattacccagcctcaggtatttctttattgcaacacaaatgaattaaggcaccctctcattctattaccattggatcgtgtccattgtctaatcacatttctccacagctgtccaatcttcattggacctaagccctgggtctttgggtcttcaattctgaagtttcctgtgttacctaaaacttcggttaaatacatttgttatgcttttctcttgttaacctgccttttgttagaggagtgtcagctgtgacccttatgatgggtgagaaaatgtatcacatctttctgaccctacactattgtaaatgggacgatcactggttactaatgtcaatagaagtgactcctatgtagcacagcagtaagaatggcctcttactgggtcagctaatcccacacagtagattaaaacaagttcatttctaggaaaacattctctccatcacattaaaaaatttattttttaaaattcgcaaacaaaattgtatatatttatcatgtatgacatgatgtcttgaaatatataatcccaaagggctgggattacagatgtgagccgccgtgcctggccaaagggaaatttttatgtgaggtttctaaaaatgttccttaaagggaattgactcatcttagacaaatacagactaaagagtcttagcttctccctcttaaaagtaagggaagataacatcactctcctccttttccttagagtgtttattttggaaatttataactgcaagtactttctgctctcttagaaatgtatgtaaattgttttgaaaagtagataggccctttgtcaacttgaccctagaatgcctttctcaagaactcaggaaggaaccatcttctttgaatgtaaacattcaaggaagatagcttcctatctcctagtttcagtaggagagtaggggagtaattttagcctgactccaagttgtaaaactacctcctgtccaaacaatatgagaagtttatttttcctttgtataaagtcagttaacttacgcagatggtcaccacaattaccaggtaaatttaggataaacttaagtgtaatgaaatggtgctgtcaagacctctcacttgaagactagttatgatttatcttgagaacgtgtatgcaacaggttgtatgtgcttgggtgtatgaagggtgagagttctctctgtgcaatctcttatcaaattgcctgtgatgtgcattaccttctggtttcacgcttattcaaaaataaaagggctttcttcctctatcactttcgtggagaggatttctggattgagagaatatttgttttttaaattatagttccccaacactcagttgagagtcgtgcccactttcttctcccctcttcatacttgtgaagcaggtatgtttgcaaaggccatggctgccatcttggaccatgtaggtgaccttgaagatggaaaccaaccagcacgttcagaaaaaggggaggacgaaccttagtccctgataattatggagccattgcaccagtcctgaatggcctacctttagacttcttttatataagagagagataaaattctcttgtttcagccactgttattttggttcttctgttaaatgagggtgaagcttattctaactgatatattgccagaaagaataacttcagctaaaatatagccaaatcaggtttcttatttaagcatccactaacatttaactgtttttttgcttacacccatgtactgcaagtcaactgatttagttatcaagacatacattttgtaaccagtttatttttactccttcaccataaagtcatttgctcaaatctaaatgttctctgggtgctgttctggctttgaaaaggtgactaaggtggacttctgataacacttgcttggctttatttatttcaggcaaaaatattaaactttggtcaaattttgatcaatttctcatttatgcatatgttgaaatgagcctaaaatgttcttaagggaaagcttggccctctcatcagttcacttttatgcagaagtagctacatcttctattcccaggtcagacagaaaggctcttcagcttttgttaaaggatgttaattcagtgctaactttgctgatgattaaaacccatcattctgtctgacagcagcacctgataatacctccaggcacttgtcgggaagtagaacattaattcacagccactcagtatcatgcaaaagtctgctgagaagagtaatatttatggaggacagtttaaaagaatatgtagtcctttattttctcagatgatctgaaatccatccttaaacagataatcacagggctgctcatttgaattcctttgttttggtcccttgtacagtggcttttactcagttatgttctgttattatgacctctgcctacatttaaacatattctaagtaacctctctgggaacttataatcattagtgtgaagatgttgtttattcattacagggcatgtgtcttctttacaaggtcacatgtgctgactttctctttgatttcattataaaaatattgtgtatccacttagtgaataatttttattgagcaactggtttatttttagagacattgcatttttgtgttgcatataatttactaagtccaatgactatttttctgaaacaagggaaataaaaataaataactgggcttaatgtacccttccctttcacgcttttacatattgtcctcctttttcgtgatcactatgtcagtgattttctaccttgactgctgtggtctaaaagtttgtgtccccctaaaattcatatgccaatcttaacctccaaggtatctgaaggtggggaactttgggaggtgattaggtcatgggggtggagacctcacaaatggaattgatactcatataaaaagagtcagagagagactcttcaccccttccaccatgtgaggatgttgtgcaaagatgcagtttctgaactaggaagcagacccccatcaatacaaaatctgccaacatctcgctcttggactggccagcctccagaaatacatttctgtagtttaaaaaccacagagtttattgtattttgttgtagcagcccaaatgaactaaggaactggcttatggctttgtctctttggggtaaaggtaaagaaggatatttggatcatcccatttttcttaggatcatcccatttttttttttttttagaatgtaaaagttatgctgagcttttaggaaaaacaacttcaaaactgaagtccttcagaatgattaagagaaattagaatttctagtttatattttaggcaatttatttagagttggggtcttgttctgttgcccaggttattttaaaaaatctgtttaaacttatcattttaatacacttactttttaatagataatacatttatgcagctctaaatctaaaagaataaaaaaggtatgcaatgtagtctttccgaactcatgtcctagccccttagttgtcttccttggaagctgccaaggttatgtttcttttgtagccatatattttggtgtatttttttgtaaataaaaatacgtataaactcttttttttctgatttgtcttctttttgagatagggtctcactctgtcacccaggctggagtgcagcagtgcagtcatagctcattgtagcttcgaactcctggactcaagtgatcctcccaccttggcctcccagaatactgagattacagacatttttttctgattttttaattgtaaaatactgatcacattgtgctgtcattttcatttgtcacaaactgtatattatgaagctttctccatatcgaaggggataaagtccttccttattctttgctctgatcaccaagtactctatggctatactttacttaaccagttccctattcacatcattcttgttgcttctaattctttttaaaaattgttattacaaacaatactttattggctaaccttttacagagccaagtttccagtatgataaagccctataagtttaacttttggctcacattttactggattttaggttttgatgggtattgccaacttgctgtccatagaagtagcactattttacaatctcctggctatttttgtattgctttttaaatgaggccttcaaagcttcaaattactttatgtcatttgagtgctgtacagcatcatagatggttttgccctcaagaactaacattcaaaagaaatcaatttttttccaagcacatacatattttttaatgggctgttttgcttattgtaatctatttgtccatatttctttgcgaaagagtgagtgtaatgaatcaggcagacatagctagaaaggtagttaacaaatgacattcctcccttgcctcagggcccatcgtgttgtcatagatggctcttgtccctggatttagacaggctggcagctgcctattaccccatccataacaccgtgcaggagatgagggtggagagagatgagctggaagtctggtggctaaaagcagaagattaaacacacccttgctcaggaaaactttccaaactacacattactcttgacttaaaaaaaaatgaacaaaatatatcacccaaaaaatcctgtcctcaagaaggagtctgatgtgaaagaataaaacgtcgatttatgaatagcatgctatgcatcacctggcaaaggcctgaagaatcctctagtctcacgaggtgggccagcaacgtggatctgtctccaaatgactgtaaacttgtttctgcctgtctcactttacctgtgaaataaatggacgaatacatttttctctttgtcagaatggcatcacagattgctcagatgcttttccctggaatcacacagtcaaaatgtggccaaaactgaacaggaagctgagacccgcccccaaacagggctcagaacacagctctcactctcattctgggaagtccaaattctgcctcacactcaaggcccttactccagaagctggccccacactgttattctggtttattcccagattaatccttcccacagaatccacactccaaggcaatggaattatatgcttatctggaaacacgctctattcttttccacctcatgcctttatgctctttctgtgcctgtacgtttctcttcaccatgtctattcatcaaaatcctagttgtagaataactagaattgtagaataatcagtagttgtagaagaaaactttccttaagttttccctaactatgcttcaacaaattctatgtaatctcttccctgggtcaaacacatattatattttctggtacttctcacccagaattccaggcagttattcatgttttttatgaatttgactctttcattcccctgcattggattataaacccttttatgacacataccatcaaccttatatccattgcagtgcctggctcacttctgaggcttaaacacacacacacacacacactcacacacacactcctacatgtgtttaatatatggataaaaagaattttgatggaagtaaatgactgaatgaatcaatatgtgtttcttcagtaggtcaaatggtgaaggacattaatcgtaattgatactacatatttgcagctggaaactcttgtttgtttcatgcataagccagtggttcttagtgacatcagaatcaccttggtagcttggtaaaatacaggtcgttaggcctcatccccagaatttgatttgatagatctgagattgtacttttctaacaaattcccagggggtgttgatgctgcaggttcagccaccagattttgagagccgttgtgattgtatagcagtctattgtaattgtgtgtgtgctaacaggattgttgccaagtcacttttgtttaattagctctgatctgtttacccaggaggatgtttgatagacctcaggaacagatccgactctgccaatgtatcaatggactgtgattgacaggaagaccagccttcatggctggcattgtttggaaattgttgctcccttgaacctgtgatggaatccaaaaaaaattctttcatcatggtccttaactctcagaggaagaagagtagcacctgcagctcagccgctatttggacttcagtactctgctgtgataatgcctgggatagcgaaaaccacatacagctcaggcgctgtgctgatataaaacctgtgcagtcccgatgcctagatttcaaaaggctggggtcattagaacataatttgtggatcatcatggaaaataaaaatgaggggaaaataatagttataattaaattataaataattaaaaaatatctaatttataattaatttataaagaatatatttataaaataaatacattataattaaaatcataataaaaacatgattaagaatttcaagatggcaacaggagaacgttaagcatggggcctactgagcacaggactctgtgtggctgcccaggttgcgttccatgaatttgctctgaacttggctgtgtagggctttcagccattctggaagagacagtagatggcagggaaagggactgggcaaaggcaggaggagttggatggtgcatgagtagagagagaaggaggaagatggtgttaaagatggctttcctggctcttctttctctccacattgtgagagtgttgcttttttggggtggggtaggagggtgcctcaacatctggtgtctgaacctgtagcatcagcatcagctgggaatttgggagtttcctggaacacaaagcaggaaacaccccctgaagttttggcatgtcgctcagcacatgggggatatgatggtttaagaaagaatgacaaggacaaggacactgacaacacccccatttgtcccaaagcaatgaagagcacttgacaagctccaggctgcccgagagcagcaaggcccccctaggtagggtaccagaacttggaatcactcttgttctcttcctttagtgtgtcttcttcttcaacttctctttaacttttcaaaaaataaattatatcggccgggtgcggtggcccacgcctctaatcccagcactttgggaggccaaggtgggaggatcacgaggtcaggagatcaagaccatcctggctaacacggtgaaaccccatctctactaaaaatacaaaaaatttaggcgggcgtggtggcgggtgcctgtagtcccagctactcaggagtctgaggcaggagaatggtgtgaacccgggaggcggagcttgcagtgagccgagatcgcgccactgcactccagcctgggcgacagagcgagagtctgtctcaaaaaaaaaaacaaaaagaaaagaaaagaaaaaataaataaattatatctcttatttttctgtggaaaatttttttcttgaaaaattgtatttattttaaaaaataaaggaatccctggcttctgcattaagtgcttagtagatgacaagctcctcagggcccaagatccacctcattcatctttgtgtccttgttcacaggacacaaagtggtacgcacatgttgaaacactgaatggaattgctttttgcattcgctcagaagcttcaaattctctccgcattgttgagcacagtgagcgcagggttattgtttaaatattaaaagagaacacagctaatttgaagcacacatttgggttctggactatggttatgccagcttcattatgaagtttttcatcactttttggccttttggctaagattgaatgtattatgttgtttttcttgttaggataaaaccttttgctggattatatatccagaaattttttaaggcttttgaggagatttaatttgatacacagctgcatgctctaggtaagtcaattaacacgtctggatcttattttcctcatgcattaatgtaacatctaattgagcaatccatgtactgacacccatttacgagtcaggatcataacacccactattttagcttgaacggctgtaaccaagtaccatagactggcggggcttctaaacaacaaatttatgtcccacggttctggaggctggaagttgagatcagggtgccatcaaggcggcgttccagcgaggatgctcttctgggttacagactgccaacttctggctgtatcctcacatggcagaaagaggagagagctctctggggtcatttttataagggcactattcttattcataagggctccaccctcatgacctaatcacctcccaaaggccctacctcctaatacaaccatatcaaggattaggatttcaacataagaattttggagagtgggtcacaaacattcagtccattgcaatacattggcaaacggttcttgtcgtcttatcaactagtgctcatggacatgtaaaaaataataatgcaattgcggcacatagcaaaagagctctgggaagaagggctctggaacatagaggaggagcccctgctctctgcctggggagctgagacagattccacaaagacggtgcacctgaaaagcgagtgtctccagaagtggtggatgggctccctgaaaacagcttcacactgcttcttctgagcgtgttggtcagaatggaagaatctctaatgtcccctccagacctggtgaatgaaaatactgggatttaggagatggcctaagaaatgtttgggagcagcacatgtttctatttctctgctttttttttttttccttacagatgcttggttgtctcccatttcaagacatgtctgttttgactgcatagttacatttgttgtggtgagcagactgctcattaatattttaattaaggaacacaatttctgtcctcactgtccccatatactagtttctgctttttttccactttctttaaagaaaaaattcttggaaaagctttgttttatagaactctcttgagcaagagcaaatttgttttctccgcaaaattaaaggtgagctatcttggaaacatatagacctttccatatctctgatttcctgaatttctagtgagattcccttgtcttctgatgaaaatatttgctggtagtcatttgtaatgcaaacagcttccctaacaatctctctagagggtggaagggaatctgtttctaaagaaaccatgtgacattgaggacttctatgactgttacaattttaagaaaattttaatttgaccttttttaaagaaaaaaattaggtgtaaagtttaatccttccaattcttcagagtctgagaacttgttaaagagggaggctccctaagatctagaattcttgaaatgaatgtccataaccttgaacaacttttctatgttctcaaaatcgctacaacagaacccctgaaggacttgaacttctgtgaacttgaaaacagcaagttcttagaacctcaagttctctgtctaccaaattaaaacattaattcccatctcatgatgacattgcttccattttattccctcaatattattttgaatattagggagtgggtgggtaggtctgggaatatcacagggatgggtttattgtttgtttccgtaacatgacacatgcaatggtggagagcttgtgtcattatcaaagaaagcaagaaaactactgagttctgtactttcctatttggtacaaagatgctgtggacttcgtctgccaaattctgctcccattttgggagaaggagtgggttggaaaaaccatagaaataggtttgatgggaggcaaacactctcagtgtccccaagaaccatcattggtcaccccccaaatggggcaaagactgatttttgtctattttatagcattgctctgcctccctccttcctcactgcctccccctgaaaaatttgaagcacatgttgctgaaaaaatgatgctgccaacactccacagtctcaggaacactgagaatgttgaaatatttgagtttgattctctcctctgcatgtttgtccatggatttaaaaaaatccgtagttactgaaacaggtttcatttggcaactcttacaactcctaggctactattgtcctgtcaacttactttcccccatgtggaaactatttctttcaaatactccttttattgctaaactaaaggcaaaacaaaaatgaactaggatgacaaattcttaagaaatgtttcactattttatttgcttactcagaataaggtacaatcattcacataaaaaaaatcttcctactcagcagaatttgcttttgttttcctccctgtaatttactgcctggttagggtttaatagcacaatatactctcattcactgtccccataaaatctgcaggcagagaaacagctacagtcggatatgttcccgctctgggttaagaaatggaatactgaagttgaatcttggtggaagtggagctatgaaattataaggcaaattgactttacaggcatttttgctgagaatagggtgctagacactcaagctctgcaaacctcctggggcctgtctcattcagcacactccactgctttcactcggtttaatttctgaatattatttgtgttgattgttaatgtcacgtgatacaatattgcaagagttatgattgagttgaacagtgtttctagagcttactcaaagaagagaaaacactcttggataccagtggggttaagtatacagtgatttcagcatagtttttttttttaaattatacttttagttctggaacacatgtgcagaatgtacaggtttgttacataggtatacacgtgccatggtggtttgctgcacccatcgacctcatcatctacattagctatttctcctaatgctatccctcccctagctccccaccctctgacaggccctggtgtgtgatgttcccctccctgtgtctatgtgttctcattgttcaactcccacttaggagtgagaacatgcagtgtttggttttctgttcctgtgttagtttgctgagaatggtggtttccagcttcatcaatgtccctgcaaaggacatgaactcatccttttatacagctgcatagtattcacatatacacatagtgtatatgtgccacattttctttatccagtctattattgatgggcatttgggttggttccaagtccttgctattgtgaatagtgccgcagtaaacatacgtgtgcatgtgtctttatagtagaatgatttataatcctttcagtatatacccagtaatgggattcctgggtcaaatggtatttctggttctagatccttgaggagtcaccactgttttccacaatggttgaactaatttacactcccaccaacaatgtaaaagtgttcctatttctccacatcctctccagcatctgttgtttcctttttaaagatcgccattctaatttgagtgagatgctatctcattgtggttttgatttgcatttctctaatgaccagtgatgatgtgctttttttatatgtttattggccgcataaatatgttcttttgagaagcatctgttcatatccttcacccatgttttgatggggttgtttgtttttttcttaaaatttgtttaaattctttgtagattctggatattagccctttgtcagatggatagattgcaaaaattttctcccattctgtgggttgcctgttcactctgatgatagtttcttttgctatgcagaagctctttagtttaattagatcccatttgtcaattttggcttttgttgccattgcttttggtgttttagtcatgaagtctttccccatgcctatgtcctgaatggtattgcctaggttttcttctagggtttttatggttttaggtcttatgtttaagtctttaatccatcttgagttaattttcgtataaggtgtaaggaaggggtccagtttcagctttctgcttatggctagccagttttcccaacaccatttattaaataggggatcctttccccattgcttgtttttatcagctttgtcaaagatcagatggttgtagatgtgtggcattacttttgaggcctctgttctgttccgttggtctacatctctgttttggtaccagtaccatgctgttttggttattgtagccttgtagtatagtttgaagtcaggtagcgtgatgcctccagctttgttctttttgcctaggattgtctaggctatgtgggctctcttttggttccgtatggaatttaaagtagctttttctaattctttgaagaaagtcaatggtagcttgatggggatggcattaaatctgtaaattactttgggcagtatggccattttcacgatattgattcttcctatccatgagcatgcaatgtttttccatttgtttgtgtcctctcatttccttgagcagtggttcatagttctcctggaagaggtccttcacatcccttgtaagctgtattctcaggtattttattcactttgtagcaattgtgaataggagttcactcatgatttggctctgtttttctattattggtgtataggaatgcttgtgattttttatttttgcacgttgattttgtatcctgagactttgctgaagttgcttatcagcttcaggagatttgggctgagatgatggggttttctaaatagacaatcatgtcatctgcaaacagagataatttgacttcctttcttcctatttgaataccctttatttctttctcttgcctgattgccctggccagaacttccaatattatgttgaataggagtggtgagagagggcatccttgtcttgtgccagttttcagagggaatgcttccagcttttgcccattcagtatgatattatctgtgggtttgtcataaatagttcttattattttgagattcttttcatcaatacctaagtttttagcatgaacaggtgttgaattttatcaaaggccttttctgcatctattgagataatcatgtggtttttgtcattggttctgtttatgtgatggattacattgattcatttgcatatgttgaaccagccttgcatcccagggatgaagccgattcgatcatggtggataagctttttgatctgttgctggattcagtttgccagtattttattgaggattttcgtgtcgatgttcattagggatattggcgtgaaattttctttttttgttgtgtctctgtcaggttttggtatcaggatgacacttacctcataaaattagttagggaggagtccttctttttctattgtttggaatagtctcagaaggaatggtactagctcctctttgtacctctggtagaattcagccgtgaatccgtctggttggtcctgggcttgttttggttggtaggctattaattgctgcctcaatttcagaacttgttattggtctattcagggatttgacttcttcctggtttagtcttgggagggtgtatgtgtccaggaatttatccatttcttctaaattttctagtttatttgcatagaggtgtttatcgtattctctgatggtagtttgtatttctgtgggatcagtggtgatatcccctttatcatttcttattgtgtttatttgattcttctctcttttctttattagtctggctagcagtctattttgttaatcttttcataaaaccagctcctggattcattgatttttttgaagggcttttcatgaatctatctccttcagttctgctctgatcttagttatttcttgtcttctgctagctttcgaatgtgtttgctcttgcttctctagttcttttaattgcaatgttagggtgttgattttagttcttttctgctttctcttgtgggcatttggtgctataaattcccctctaaacagtgctttagctgtgtcccagagattctggtacattgtgtctttgttctcattggtttcaaagaacttatttatttctgccttaattttgttatttacccagtagtcattcaggagctggtggttcagtgtccatgtagttgtgtggttttgagtgagtttcttaatcctgagttctaatttgattgcactgtggtctgagacactatttgttatgatttccattcttctgcatttcctgaggagggttttacttccaattatgtggtcaattttagaataagtgtgatgtggtgctgagaagaatgtatattctgttgatttggggtggagagttctgtagatgtctattaggtctgcttggtccagggctgagttcaagtcctgaatatccttgttaattttctgtctcattgatctaatattgacagtggggtgttgaagtctcccaccattattatgtggcagtctaagtctctttgtatttctttaagaagctgctttatgaacctgaatgctcctgtattgggtgcctatatatttaggatagttacttcttgttgttgcattgatgcctttatcattatgtaatgcctttctttgtcatttttttaaatctttgttggtttaaagtctgttttatcagagactaggattgcaacctctgctgtcttttttttcatttgcttggtaaatattcctccatccctttattttgagcctatgtgcgtctttgcacatgagatgggtctcctgaatacaccacactgatgggtcttgactttttatccaatttgccagtctgtgtcttttaattggggcagttagcctgtttatatttaaggtcaatattgttatgtatgaatttgatcttgtcattatgatgctagctggttattttgcccgttagttgatgcagtttcttcatagtgtcaatggtctttacaatttggtatgtttttgcagtagctggtaccggtttttcctttccatatttagcgcttcctttaggagctcctgtaaggcaggccaggtggtgacaaaatatttcagcatttgcttgtctgtaaaggattttatttctccttcacttatgaagcttagtttggctggatatgaaattctgggttgaaaattcttttctttaagaatgttgaatattggcccccactctcttctggcttgtagggtttctgcagagaaatccgctgttagtctgatgggcttccctttgtgggcaacctgacctttctctctggctacccttaacattttttccttcatctcaaccttggtgaatctgataattatgtgtcttggggttgctcttctcgaggagtatctttgtggtgttctctgtatatcctgaatttgaatgttggcctgccttgctaggttgaggaagttctcctggataatatcctgaagagtgttttccaacttggttccattttccccgtcactttcaggtacaccaatcaaatgtaggtttggtcttttcacatagtcccatatttcttggagtctttgttcgttccttttcattcctttttctctaatcttgtcttcacactttatttcattaagttgatcttcagtctcatatcttttcttctgcttgatggatttggctattgatacttgtgtatgctcacaaagttctcgtgctgtgtttttcaggtccatcacgtcatttatgttcttctcttaactggttattctagttagcgattcctctaaccttttttcaaggttctcagcttccttgcattgggttagaacatgctcctttagcttggaggagtttgttattacccaccttctgaagcctacttctgtcaattcgtcaaactcattctctgtccagttttgttcctttgctagagaggagttgtgatcctttggaggagaagaggcgttctggtttttggaattttcagcctttttgcactggtttttcctcatcttcatggatttatctacctttggtctttaatgttggtgaccttcagatggggtttccgtgtggatgtcctttttgttgatgctattcctttctgtttgttagttttccttttaacagtcagcccctctgctgcaggtctgctggagtttgctgggggtccactccagaccctgtttgcctgggtatcaccagcagaggctgcagaagagcaaagattgctgcctgcttcttcctctggaagcactgtcccagaggggcacccgccagataccagccggagctctcctgtatgaggtgtctgtcttcccctgctgggaggtgtcttccagtcaggaggcaaaggggtcagggacccacttgaggagggcatctgttccttagcagagctcgagcactgtgctgggaggtccgccgctttcttgagagccagcaggcagtaacgtttaagtctgctgaagctgtgcccacagccgccccttcccccagatgctctgtcccagggagatgggagttttatttataagctcctgactggggctgctgcctttctttcgagatgccctgctcagagaggaggaatctagagaggcaggctggcagtatcagctttgccgagatgtggtgggctccgcccagtttgaacttctgagaggctttgtttacactatgaggggaaaaccacctactgaaccctcagtaatggcagacgcccctccctccaccaagctctagtgtcccaggtcgacttcagactgctgtgctggcagcgagaatttcaagccagtggatcttagcttgctgggctctgtgggagtgggatctgctaacctagaccacttggcttcctggtttcagccccctttccaggggagcgaatggttctgcctcgctggcattccagatgccactggggtatgaaaaactactcctgcagctagcttggtgtctgcccaaacggccgcccagttttgtgcttgaaaccctggggcctggtggtataggtaccagagggaatctcctggtcttcaggttgcgaagatcatggggaaagcgtagcatctgggccagagtgcaccgttactcatggtacagtccttcatgacttcctgtggctaggggagggagttccccgacccgttgcacttcccagctgaggtgatgccccaccctgcttcagctcgccctccgtgggctgcacccactgtctaactagtcttaatgagatgagccgtgtacctcagttggaaatgcagaaatcacctgccttctgcactgatctctctgggagctgcagaccagagctgttcctgtttggccatcttgccagccactcctgttgtctgttttttaagaggagcattttacactttgttggtaatgaatagaatggggtgcagaatcattgaattatgggaggcatctgtttatgtgcctgttataaaataggagtttttatgacccagggatagattgatgaataggcctttgaatgatagctgaagaaacagcacttttatagtctcctactttttaaactaaaagatcatctatgaacagcaaattcgatctatgatctggttcatttaattaatatcacatgactatttgaatgtataatttctcctttcatatagataactcttaagcacaagagcagcttgcaaggcaaatttgctgatgcttaaaaacccaaacaaatggggtaagtcataagaggcgataagaacagtacattttgtcaatagatactagacttactgaaagttggagcaagactctggtagccagaagggctgtctcaaatcccagctccaccccttataatagaataatttcgtcaatgcaaatgtgtgccttcgtttcccatctgtaaagtaatagttcccactttttaggtttgttaagaggatgaactcatttaatgattgtaaagtattagaacaactcatggcacttggtggtttttgtatagcattttattattatgtattattattatttattcccatgtcctttggacttttagtctagttgctccttcttttgtactactgccacccagaaaagcaaaaaaagaacctaatatgctggctcaaatacatcattttggcaaatgtatgtacgtatgtatgtatgtgtgtatgtctacatatgggcagtctcacttcacagaaatgtctctgcctcccttcattgaggaggggccatttagaccattgtagatggctcccaagtaatctctccttagcgaccactctcaccacactgtcccaaagtgacctctcattgaaatgttgaagcctctactagtgaaagtttcaagatcactggtgctatagttagcagtttaaaaccttctcaaagaaatgtctctacaggatagcttattacaggctctgtttacacaaaccatctgtgggggactttggaatttggtaactcatcagtagttataatgatcacaatcaccagccccaagaccaggaaaacacctccagaagctgtacatttttgcaagtgacacaaggtattcatcattgatcacaatcagcattggatttattgttttagttttcaagaatcttactctgttctgaaaaccatgaagtttcctcacttaaaagccaaaatgtaaatgtgtgacatgtatttttccccaaggcaagtgagtcactgcagatgcagtgacaagctatccttcagtttgatagttgatcagtgaactggatgtaaaactgcagcaagtctgcaatatgaggaaattagataagcaagattatctctaaaataaacctctactttaaaaaataatctattactccagccaaagtacacagggactgagatgatttgggggacaacattaatagatcatagatgattgattcaatgtgagaaggaatagaactaagggttagaattaaggattaaaacagtcagtgcaatgattaaatacacaggcatacgagttaaactacccgggttcacccctctaatagtatgacgggctaggttcttaaattctctgcacctgtttcctcatctgtagaatggagataattgtacctacctcataaagaaattgtgaaaactaaatgtgatgatgtctataaaacttaagaacaatgcttgcctttgagtaaaactccacaaatgctagatagtattttatcacttataataactaatgatttcaaactgctaacatttgaaactttgatgatcaaggatcaagaatttgtgaatactaatgatagtatttattttagcaatttaaagtagcttctttcaacttgctaacatttgaaactctaaggatcaatgatttgatgaaggatcaaggatttctcaatttgggagccattatatgattttttttcttagtaaaagcatttccatttatattttgtttcaagcactgtgttatgattggatagtcttaattgataatatttgttatttgttttctttcaatgagtaagctttcaatgagtaagacctaagaataacaaagatttaaaaaaatttttcaatattttatatatatatatataaattaccacagttatacattcatattgtctttaaaggtcaaattgtattttcttttttgttgttgtttcttttttttttgagatggagttttgctcttgtcgcccaggctggagtgcaatggctcaatcttggctcactacaacctccctctcccgggttcaagcgattctcctgcctcagccttccaagtagctgggattacaggcacccactaccacgcccagctacttttgtatttttagtagagacgaggtttcaccatgttggccaggctggtcttgaacttctgacctcaggtgatctgcctgccttggcctcccaaagtgctgggattacaggcatgagccaccatgcccagcccaaattgtattttcttaaggaaaatattcagcagtctcacatcttttcttaccccctcctcatcctcactgcctgacatcaacgttgatcacttgattagagtcgagtctgttaggcttctccaccaaaaagtaattctttcccttttgtaattaataattatttggaaggatgtattttgagattatgtaaatagttcatctcttatgaaaaactcaatttatgtattcatttcatcacacagattttcctatttcattcaatggattcactaagtatttgggtgcttacattgcctctgatttggctagtggggactccttcaatatagttctctgttattttgtcatgtccccatctttttttagtatttctgtactttctggaacaaaaatatattcgacttatcttgtaccctaaagtcaatcatttctccaaaaggggcccggatttagtgaacagtttttagaaagcagtatttgggttctagttgttactcatcgcttttgttgggggtcactctcccagacccccttctcaatggccaagcacaaaagcacatttacatctgtgtgtatctagatttgtatcttatctatctattgaaaatcatgcatttaccccattatcttcaattgcaaccagactcacagggttcattctggttctcttctttcatatttgtaactctttgaggaatgagaaaccgaactgctcaatttcttaatatatttacttatttaaattccttcctatataaccaaccctgtgttgccactttgtccctgtaaaagaaatcagaatcttgggacctcaaactcactacgccaaaaggaaagttaagcctgggaactgagtcatgcaaatattgccttccttcttcctgaaacagatagctgtcatttcacaatcctatgtcataacattgtatgtaagccaggttcccaacacggcaaaaggccatatacatccccagatggcccccttcacagattgctctcaaggaaattccttgttagctccaaaatctttcaggatacatattcccctataaaagcaacacatgccaattgtaaccttggtcctgccacctaagtttaactcctaaaaccgagttctgttaaatctcaccctgaccatgtcaattacgagcttatcttccaaggtacagaacaagtacaagacacgaaccactcctgcgcctactcttgagatggatgcataattgtctctttcctttctcttttcaagtgttcaccttcttttatgtaaaacatagattcctttagtgctagttacagcctcacaaggatgtaactatttgtttcactgcctaccctccttccctttcccccactgcttgctttttccccttaagtaatgagttccccaaaccctcttcggaaagcccaggttacagatgctcctgtgacttgtgtttttcctgggtcgtcctcaaactttggcttaataaacctctactaattgagacatctgcctcatttttgtttaataacctttccccctgctgatgtttcctctgcccactgaggctctggcaccccacccccaatctcctgctccccactgcccccatgggtgccctcctcctcccactctagatctgatagcctgcatcagacctccccacccaccccatgctaggccctcctggtttgctccagctcaaacacacctcactatgcccctgtgaatgaggactaaccctaaccttgcttgttgcacctgatagttctaggatggaattgttccaaaggaaagaggaaggaatagcataaacttcattttggggttttcttaggggattttgctggtgctatttctggcatctaccagtaatgagagtttacctaagttgactgatcagaacaattcggcatacccagacatgtggctaagccgctggctgctcagaggcatgaattctttcgtagcggtagtctgttttcctgttcattagcgcaacaggaaaccaagcactggtaattggataagtcctccttttacttgtaatgagcaccaagttagtggtaatgactaagagggctacttaactgagtttcagatcttgttctaaaattctttgtatctaagtgagcttccatttcaaattcgttcaggtatgagattggaatttggcttcttatgagctcatctgctattccatttaccttagccttctctttggttccaggatatggtgccaaaaaatatatttctgcacaagagatgctaatatgataagggacatctgggggcttttgtacacattgctgtgattttcttctgttgaccagaaaatcctagccacacagtacccacaggcccttgaacatatgactacaatatataacttgagctgctttagtttgaagatctagtgaggagcagcagggtaagcgatttcccccacctccaaccaggtaatcacaatagacgtgtgtaagctttgaaatttcctataaacaaattttgctgaaactggctttttgatgtaaagcagcatttgttatgcaagttctactgctattactcttcccatagtctattctggttgactttcaggatgaagacatctaagctacttctggattccctagaaaacttgtgctgcctattcttttccaactgtgtagtcctctcctggctgtttctgtggtccagcagactgtggagaaatagcttactattccattagaaagaagatcttgtgtaataaaaataagaagtggtatcaggtcatgggagctttggaaatggaatcgagatttggtgcttgtctttgcctctgtggctaacaaggtatagaacgtttggaagtttcttaactgacttaggccacctaaaggtattagagtagacaagcagtttgtaaaaggtgctttgcaggtaaccaggggcctgctggtctctcatagctgcctcagaggctcatgatagaaggtttgagaaactaggggattgtcactgagagggatacaatggggacttcggtcgaataatctccattgtctttcgagcagaacagcagcagctctatttcctatacatttcacattttgtaattcttgaaggattttttttaaaacaaagacctctgctaaaaccaaaccaaaccaaatcaaatcaaataaaagctgcaagactcctgaaggtccctctagctctacatttttagtactttcctatgatatttatatatcccacatgctggttcactttgtcatctgagatgagactaatctgtgtccatctgggatagaaatttcttccgtactttgatgaaaagcagtgtagtcctgcaagatgtgagtctatttccccatactttattgacacaggtatgaagatgagaagagatggaggcagcaaaggaaatgtggttttgcatgtcactagctcaactccctctgcattttcttttaagcaagggaggtgctccattgtctctatagggcaacagcagttcactgggtccccacatttttctggggcttttgtgagaagcagtaggcaggaacagtgaagagaaacttagcaggaggcccaggtgctgtcttttctagtttcagagctatctgatcaggacaaaaaggaacaagcttgtccacagcaagatggccagcaacttggttatttacccagttagtcttggggaacactagagctcttccaatagctgggactatttaaattttttcaaggaaacatatgctgtgggttggtggtagatgggattcaggaggatccttctcttatacaagatgactttctggataggtgtttgtggggtacagagggagggagcaaggagaataagagaggaacaaaccaaatgttcaacattctaacactctttaataatttatctaaaattattggatattgaattattagaggcattgaatcttttactttttgtatgacactcactcagtcttcaaataatttctgattgaacactagattaagaggaaaaaataccacaaatgaaataacttgtatttttgttacgcaaaggattattctaaaaaataataagctgttcctctaagcccttttagaacacatggaaaacttcagaatagtgtgagggcgtcttacatgcacttctttctttggagattgtgataacccaagtagaggatttaggattgtgctgctcagagacaactgtttggataaaataatgccagattcatcgtttccagacttgttaaattcatggagtattaaaataaaattgaaataaaatggaaaatatgatgcccagttgttttgtcaaaaccagtctaggtgttgctttgaaagtagtttttagatatgattaacatttaaatcagtaggctttgagtaaagcagattactctctgtaatgtgggtgggccttgtcctatcagtcgaaggtctgaaaagagtgaggtcccctgaagaggaaggaattctgcctctgacctgccttcagactcaagactgcagcatcaactctcggagtttccacccatccaggctgccctgcaggtttcagacttgccagcccccagagctggtttagggaattaaaccaatctttctctctccacatatatacatactttgttttgtttctctggagaaccctgactaatagaccaatacaagattgtggttttaattccaccaagtaaggactgaaaactaaacaaataaacaaaaatgaaaatctaccatctattgtcatcacttcatgaaagaaagaaaaatttactattcccataggaaagacatactctcagaacaaagaacaattttattgatgaataaattctatcctattaactagcttaccacattgcctttacgtgtctcattttccacacacaggagccagcctttaggaactgtgctggaggtgacccaacttctgattgtgtgggagaactatcccactgttactcctaagagaacattctctcccaatagctcccccgatatggaatgtgacagagtaacaagatgccaaaatatatagacctctttttctttctacaacataggtgctcttaaacagtatgcagaggattgtgtagctgcttataataggagccaggctgacacagctctcttttctcttttgtcacaggtgatcacagaaatagcttgctgtaacagcacctcacagtttcctcttaaaatgaaaccacattttctttgtgccctttcagctcagttctgctgttcatagaggggcttgggagattttccactgtaggtttcttaaaattcattatacttgtagaatgttagagctagaaggtcccctaaagatcataaagttcaatttcattttttacagatgagaaaacagaggctaagagaggtaaagaggtgcttagttgtggcagaagattagaagagaagttcctgcatgtcggtttagcaatcatcttgctcattacaacttcctcttctgccttaatcacttttcagttcagtagcctctttcctctagaatagcccttctgtattcacactgccttttctttgctttgaagttacagatctgaaactcttgcgttagctatgctatggttttcttccacattctgtacactgtactgaccatcctcttataaacctcttctcttctaggttaaagatttcttgacttccctctggtgaagcttgataccaactgacctataagggcttggttttcacaacagagtcttagtccaccctcgccatcgcaccaaatactgagagaacaaataaaattattgcttgaagaaacgaagtaaagactatagtattcatatttttcccacatgccatttgcagtagcttttcatatttctcatctatcccacactagaaatttcatctattggcttttgtaaattttctttttgagccacaaatttatctcagtttcagattctaatctattttcagtagtgctttcagtttagtttactcccatttcaaaaatactccgtcttgttctttacagcaataaaatccaaatgcaaattccgacaacctcagccaatggtgagtcatggtccctcatttccacctcttctaaacggtcatggttgctcattttcactcttctaagcacctcttctttacagcaacaaaatcagaaagcaaattcaggcaaccttaaccaatggtgagtcatggttcctcatttccacctcttctaaacccctcctctgatggtcaggacccttctcattcctcaagtagtaactattcagcactttaccacttcccttgaatctctgacccattatctttttcgtctttctcacagaaaatagaggcagccatttaagtactttctcaacttactctccaacaaatctgattcaaatactttcatctgtagttttaccttctctctagtgtcaaaacctgaggtaatcctaaacctcttcaaagacaagtcattctcggtgtgctactctgttctgtgtcttcaaactgggctcctttgattattgctacctctctatcgttagcctttctactggctctgtcctcttagtatttattcatgttcaagtacttcccaaccttaaaaaaataaccttgacccaacatcctctttacctcaacttcacttcataaaattttaaagacatcatacctcaaatccactatcctacctgtcttagtctattttatgttgctatcacagagtactacagaatggataattaataacaaacagttattgatttggcttacaatcctggaggttgggaagtccaagggcatggtgatagcatctggcaaggtagcaagacttcatgctgtgtgataacatggtggaaagagcaagaggatgtgagcaagcaaacaagagggggctgaacttgcttttataacaaaggcactctcatgataactaacccactccgtccataacattaattcatccgtgagggtagagtcttcatgacttaatcacctcttagtagactccacctctcgatgctgttgcttttgggattaagtttccaacacatgaacttcagggaacacattcaaatcatggtactacgttgcatccatattacaatctgttgtgatctacttttgctcccacaggtccattaaaactgtactccatgaatttctggttgctaaatacaatgaacattattcaatccttattctttcaatctcttggcagaatactttccagttgaccaacagagtcttgttggcttttatatcccttagacccaaagacttacagggcttggcagagtttctggcaacataacgaaatctgaaaattgacgaaagatttagaatggaaaataagtggatgccaaatggtgaaggctttaaatgctaaactgtggggactggcttttgttttgtaggcagtgataatctagaaaggtctcttagcaggaaagtagcattaccacatcttttgggaagtaaattctggggcagtttatggtttggagcagtggtttcctttttctctttttttttttttttttttttttgagacaaagtcttgctctgtcactcaggctagactgcagtggcacaatcacggctcactgcagcgttgacctcctgggctcaagcaatcctcccacctcagtctctgccccaccaagtagccaggactacaggcctatgccatcatgccaggctaatttttatattttttgtacatacagagtcttgctacatcgctcaggctggtcttgaactcctggacttaagcaatctaccggccttggcctcccaaagtgctgggattataggcatgcgccaacgtgcccatcctaaagcacattcttaacaggaaaactgacatctgcattaccaagaggtttaatttctcttcagaatcttcccagcagattcagttgactcaaaaggcagcccatgtggctgagggttagtttagatatgcattggctcttagcagttcacctctggaaatgaatttcataagatctcagagtagaacacaggacatagacccagtggaagaggttaggtttaacaagagttctgagttgcaagctagagaaagcaactagttgacttaggctataaaggaatttattcaatggggagagatcacccagaaggctgggaaaccacgcaggaacaaaggtgatgtaatcaactactaggatcacagtctaatgtacacaaggcaatggctattcaaacaccaatgtcaggaacttacctgttgtactcactggatatgggataatggctgttgtccctgctgacagttagccattgatgccctcaacacaggccttctcctatccagtttctttgctttaccagtcagggcgaggtgcctcagatacacaggaggttgaagtttttgcttctagaggtggtgacttgtgccatccaaacactagaaagggattcagacgtggaagaacagcagaaaaccacaaaaccaaaatcaaaaatagaaaataaaacccaaagacataaacttgcaaggatccaatgcatcacttttatcagattctaaaagcaaaacctttcgaacaggtttttatgaatttagagtatcaatatataaaacaggccttgttctgcctgcagctccccttcctattctatccatcatccacgtatgacttgtcggcctctaagacacctgcaaagaatttctggtcctatgatacattaaaaattaggggagaacaaaccattttacaaatagtttgaaaattcccaagaaggctgggaaactgagcatgagcaaagcctaacaaattcaggcttagaaaagttagtttctcttaatgtcagttagttaaagctaaacaggagcacttcatttgtagtctggtactctttccaaaccagactcttggtctccatttcctctcctgaaaaacaaagcagtatgactattagactttgaagagactttcaaaaacgacagattcttctagtaccccacgaaatgtttcaattctccagcagtccttattttgtaatttgcctctgagcttttgtaaaatcatctgtttcctagttttaaactgcttgttgccataaaagcatcatataaatgactttaaaaatcatttgtggaaaaaaaactggtaatgtaatattcagattcgtaatgctaactaaaagtgaccttgaatattttgttgtattcctattttaatatttttaaagccgatttaaaaatattcatattcatataagccccaaactaaaaacaactcaaatgtccatcaacaggtgaataattaaattatgatatattcatacaaaggagcagtactcagccaaaaaaagaaaaaaaaaaggaaatgaactatgaactattactgatctttgagctaacatggatgaattttaagaacatccagtggaatgaaaaaagcctggagcaaatgagcatatgctgtatcactacatttatgtaaagtttttaatgcaggcaaatgcaaagtacagtaataaagatcagaacaatcaggccaggcgcagtggctcacacctgtaatccgagcactttgggaggctgaggcgggcagatcacctgaggtcaggagttcaagaccagcctgggcaacaaggcaaaaccccgtctctagtaaaaatgcaaaaattagccgggcatggtggtgtgcacctgtaatcctagctactcaggaggatgaggcaggagaatcgcttgaacctggaggtggaggttgcagtgagttgaaatcgtgccactgcactccagcctggacaacagagtgagactccatctcaaaaaaaaaaaggatcagaacaatcagtggaagggaaataaaaagtgaagtgactgtgaggggaaccaaagggagtgatggctctacagttgcatacatttgttaaaattcaaacaatacagtaaaatgtttgtgcttactgtatataaattacaccccaattaaaaaaaattgcatacacatctagtaagtcacaggcaacttatttcctgcttctgtattgttgggaaacagagaatattaagtatcagagataaggtaagattattacaagaaattgtcagataagatcatttatagactccctaaacctgcaaagcaaaaccatatagacccactatttaaaaaaatatagctacttttcaaagcatccactcaagctagcagataacaaaatacttattttattgttgtaaaattaaaaatagtagacaagcatatatacagttcccaagcagagcaatacaaatatataaattattgcagttttcaaagaaaatataacagccaaataattgcctacttttttgaaacaaacttggtttttaccacagcagtttcattttctttttccaaaagtcttaacacaattttgtaaagtaaatttctaacaccagagagattaagttcaatgaccatagtatacgctactgttttaaagcaaggttcacacacacacacacacacacacacacacacacaaaatggaactgaacaaaagtcactacttaatactttctaaattgcctcttttggaggtacggtgaaagaaaaacattctagatgcgtctgaaagaaacaaggtacacacacttactaaaattcccctttgctttaggtgtagttgagggaagttcaactaatctttaaaccttttttgggagagggcaatactcatcttcatgaatttttgtttactttggtaaacttaaaattgtgaaataattaaatattattaaaatgtattagtaatgtggactcaaactaaaaagaacagggaaagtgtatgttaacaaactagatgttttggagacttgatataatatggttcatatcaatgttaccatagccagaagttgcttaataggttagactgcaccataatcaaggcaattatgaaaggatgaagtgaaatgaaaatactgagatgcaagcattatagccctcctccaagttacctttattttgtgtgagggctctagtattctggtaaataaactcttccctgccccatgaccacaaaactttacttggtaagaataaactgttgggggttttatctcttactaattctcaccacaaatttcctcaaatagttactcccaccaacgtaaaagttaaaaatacaatcatacactgaaacggcatcaattatctttgccttacatctgaacaaaaagtattaacttttttatagcgtattacacttcttaataagcacttagtaacaacatttgtcagtaaatgaactggcatacatcagaaaaagttgacaatagaagaattttacatggtaccatttcaaattttcatgtacaagtaacccactttatggtcactaacctgaacctcctaataagctacacaaataatttactctttaaaaattcctactttagagcatttacattttataatttaataatgaaagcagattcttccaaaacaaaacaaaacccaaactgggaaacattaaaacacaaatagatctaaaagcttactttaaaaaaactacaaaaatggactaacaagccttaccagtgtaaacactaaggtaaaaaatatataaacaacataaagaaaacacaaaaccattttcagtcataaatatagtaaaatgaaaaaccaaatctcaagatgcctgtcaagatatatttgactatatattttgactatatttctgaaatcactaacatgaacttgacattgaaaaaataatccttaaatgtatataaaaatgggcactttgtggtaaaatgaacatgtgttttgaaaaactaagaatgtgtctttgctccaccattgtgcatagtcaacgacacaacaaaacactattctgctgcctgaatcatctattactggagtctcaagtgcatgccttttaaaaaagactaatttagatattaatatgaggatcaaaggataagatgataatctcaaagtaaaacataattgatttttagcttcattataaggctgaactttaaagagaacaacctgtgtggtcaaaaacacttttctaatttttaaaactcaatttaacgtgtcaaattataaaactgaacgtgaaaaagatttgtcttatctcactccccttaatcatataagctctgaaaatttagtaatggatgactggcagtctgttttgccactttttaaacagtagtacatgagatatgcttcaaaacattctcaaaaattactaacaactgtagagaatagccaagtgtggaaaacaatatttgtgatatttcatgttctcttgttagaactcaactctgtacctgatacttatatttgcatacacagtaattgcatatttgattaagaaaactaacataggactaaattataagtttaccaaacatttggataaactgctgtgcaaaatacttcaacaaaaagttttttttactaggaactcatccaaataaagtagtgtgagtaccagcaccacaaagttttttttaagagcacctctcctttttagagcttaagtagaaatatctaaatggaataaatcagagtcccacttaagaccttagcacatgcacacgttcatccacttgttccgtactcattagcaaagctatgtatatttgtcagaaaactcctttctttggataacactgttgtattcaggactgcaacttatggctcatattctggaaatatgctactattgatatcaaatgcaacatatccccaacttttatgactgtccctaactcatctaaacacaaacccaaatgtgtgcaaacacactggctggtaacaatcttactgaattacgccaaaaaagagtaaagtcaaatttgaaaatgtgggaacaattaagcactaagatattaatcaggaaatgtatttacccagcttgtaagtttgaatattttgatattgcacacatttaatttaaagctcatcaaaactaaggcaatgcatccatactccctggattttaaattcattttgcatgacttaaagaattgagagaaatcgaaagcatctttcaaaaattccctccaaaaagtaatgttatacttcaaagaaaaacaaaatcaacagatatcaattaataccctcaggccaatttaacacgtcagcattacaaaaagttgttttcaattaaactgaagtgtttctttgcttaaatactttcttgtgttcaacaacaaaatctgacccaagccagggtaggctgccaaatttaaggcaaatgtcatttatatctttatgcatgaagctgccacgttactgggcttttcagcagatactttcaagcaaggatctacctcataagtacattctaaacatgagttaaaaacagaatttagagcccattttaattctgcattggttatagcctttactgtaatacattattaaaatttatctagctgtttggcacaatctgttagataaaaactctttggaagcatcataggcaacttacgagaacattctcttaatacataggtttatttttttttaattaggagttttgcttttcttctgtagaacaatcctatatttctctatagagtctaaagtttagaaaaatacctcacaatgctttctttgagcactaagttcaatgatggtgataatacaatttggacagtttaagtattcttgaaactttacccaaagtggcacacaaaataatcttacttttttttttcaaagacagaacaatttcacagcacactcaatttgaagatagacattatatttgaattggaagtgaggcttgacttactctgtccaaattctaatgcatcacagtcactggtgtgaagctaataatgaaagaagcaagaggaggctttcatttctatggagacaaattgacatagaagccagattagtcttttcttcctgaactaagaactgcttttgttagaaaacaaaataatgtattgtatttacctgaatactgctttaaaaagttattaattcttcttttacaagaggtattagaaattaaaacaactcagatttctaatccaaaatatatttatctttggaaagcaaggtaaccgttgtgaaaacattgtattaagagaataaaatgcagtgacctgaaatatgggtgaacatattcacacatgataatgtaaataaatatacagaaccactcaaatacacatttataaagagaatggcaaagtacctaaaatagcattttcacatataaaatttttatattaaaatattgctcataataaataagaggtgatatgaattccatttccctcttaaaaattatctctagtagtttacactaaggagttaatctgttgttttgacaggtgaattaaaatgtttaataaaatgacactgtaacagtatatttaagtagtcacatgtgataaaatttgtttagtaattctgggaaaaaagagtccccaaatgagccaaaatgattagccctagaagactagagtataatgatctgctttatttgacaaagatgttaaatactgccttatgtttggcaaatttaatgaccataaaaaaacggaccacaactttcttcaaacttcttcaaagtttgcatgtctgggagaccaataaagggcagggcatacgaagtaagtctgtttaggtcagttgtttatgggtaggtgcgacttcattcctgttcgccctacttgcagacatggtaacttagaacagttcttcagaagctgttcgatggcaacgtggcggacatggagctgtgaggccaaagaatctttttcttgcacttggtgagttaactcttcaaaaacttctgtaaaagatttaaaaactttcatttttagtatgcagaaagccggtgctatgatttatatttcaagaactctaactgaaatctatgcattgggcaaagtgtcacaatgaaactgatttgataccaaggaaacagttctgttctctacaaagcatatcagttctgatcatcctaggcatctgtatactttacatagccaaatggaatttggctcttctccatcaagtgactacagagatacacagcaaaaatggtggttgctactgtagctgagctacttttctcaattagaatctataaacagattcaattagtacataatgtgatttatggacaagaagtgcctgttagtattcaggtctggaaccccctctaagaggctttggaatcagactactaagagttttgaatccttgttcctactcttacgtgcctcaggcaagcaacttttggtttcaatttccttttctgtgtaacattaataatgatagtaagcacttcaccaggctactgtaaaaattaaatgagatcatatttgtaaagtactcataaatttctactacaactattattgtgattatttttattattctgagaggctgtgtggttaagctttggagtttaaatccttgatctgctactgattggatgcatgatctctgtaagcaacttaacatctctgaagtacaattttctcatctaaaaggaaataaattgaaaaggagacaactgcggaatctgaacattacttgttagtgttagcattatacttgatgacgttaaggaattattaactttaaatggtgtgataatgagactgtgactgttttttaaaaagttatctcttttagaggaaatcctaaactatttatggacaaaaaacagtgtgttagctaggatttgtttgaaaataatccatgctactggtagtgcaatgggaatggatgcaagtagagatactgattattatgcctttgctaacagttgaagctggtgaaaatggcttaaagggttcactatactagtctcactacttttatatatgtttgaaattgtttataatttaacaaaaaagactaatatcacatgccttaaagaactgtttgggaggactcccacatagtgcctggtgcaatagtgggtagtcaataaaatgttagtaagaggtggtagtttccattttcacttagaaaagaaaaatgtggctgggcgcagtggctcacacctgtaatgccagctctttgggaggctgaggcaggaggactgtttgagcccaggagctcgagatcagcctgggcaacatgatgaaaccccctccctataaaaaatagaaaattagctgggtgtaatgacagtaagtcccagctactcgggaggatcaccactgcactgcagctagggtgatgaagcaagattctgtcgcaaaaaaaaaaaaaaaaggaaaaatgtatttcctctgcagttgaaagttgtttctttcttattctttttgctctggaaactctaacaggtttgaatatctcatttccaaatttaaatgtagataaagccagtggtgtcctatcatagatgattttctatgtcaaaatttgtcacacacaaaaaagtactgacagtgattcttaccctggatttgctgtaggagctttgcattcagttgctctacctcaccaagagtcatcgaattcactgaaacatgaaaatgtattcactattaccacaacaacctaggaaaacatgctgcttacatcaccaacacaatatcctatttttaaaaatcagcacttaactgccaacacaacattcagcagtactccagtattcaaccattaacgctcgtaagtgtggagtagaagttttcaaaccctgaccacaacccatggtaagaaaattttatttttattcttttttgagacagggtctcactttgtcacccaggtggcagtgcagtggtgcgatcaatggctcactgttgcctcaacctcctgggctcaagtgattcctcccacctcagcctccctaggagctggaatcataggcgtgtgccaccacacctaatttttttattttttgtagagatggggtctccctgtgttgtctaggctggtcttgaactcctgggctccagtgatcctcccaccttggcctcccaaagtgctgggattataggtgtgagccactgtgcctggccagaaacatattttttatcactcccagtacatcaccaccctccaatgaaataaaagtttcaccaaaaaatagtagtaggtccaatgaattctggtatctcctattcggtttcagtttttaaaaagtgttagtcactacccattaagcttattttgattaagcattagatagtttataacctgcagtttgaaaaataaatttgtctgtctagatgtagaatcttaaataattcacatttagaatcaagaagttgtataacaagatagcagaggtcccttctggctctgaaaacatgatttcaagacaattaaaatcacctcagcttctgtaaatttttgtagaaatagatgtagagagaatgagtcaccctttctaactttacaataagtgcacacattacctttggcctttagtaaaatgtcacatttttgcttctgaaatgccaccaccagtcaattagtcttacagggatcagcaacatgacaatgtgtattagccaacagatgaagctgtacttctaaactatacgagtcctagatgttccaattcacagtttgttgattccatttagtgtaatcattttaaatggcaaaacaaacatggaaattgcttaacttcaatgcttagaagacagaatcccagtgaatgaaaaattttaagatgtctcatttttgctaaggtgaacctgttaaatacaatgtttcccaaatctatgattccacagcaaaattcttgacccattacacatctatacaaatgtacaaaaatcccaaaccacccaacttttacttttctccccattttacttacattcctctctgctgtaatgtggatgctgggtctggacattagcctctggactagagattgtctcttcttttttctgtgcctggttgtgactatgaggccacaatacactgttacgacataaagtggcacctgaatcttgtaacatagaaagtccaaagtctgtattttccctctgctccaaaattctttgtgtacagttagagatgccacctgcacttccatctatccattttgcagaatattttggtacttgggagtcaaactgtgggagtaatttttcttctggcttatgcctgaaattaaacagatgatgctgggggtttttagaacattcagaatctgaatccagatccttattttgtgcatactgcacaatccagtttatcttcttactcaaaatggttttaacttcttcataagtactttttgaaagcttagatcgaggacaaccctggtttgcaattaaatggtatttttcaaagcagtctttatggccccttaatgatttggtgtgcaagagatcagactttggtacccctatggaaaaaaaagagaaacaaaagacttgagaaattttgttttctataagtcactttaagaacatacaaatcttagtaaaatcagagtccctgatagtctgtgaattagaggaaaaatgctaaagaatattagtattaatatacaatgtggcctaataatttctgcttcaatattcagtaatattaaattcttatggatagcaaaatctttctaagaacttaattattcaattttaatcctagtctagagatgttactgcacgatataaaaaaatactactgaacccagcaatttacctttacagattcttggcctttacattatagtgctttcttcatgaaaccttctgaagtacacacttgcaaaaatatctataatattatgaggttcaataacagaaatactgaacaagttttcctccctaaaacacagtaaatcatgttcttaaattatgtttattgaaaaaaaaaaaaccagaaccagaaaaatgcaaataaaagtcaaaaattcaataaactatttagatttatttttaaagaaaatcaaagcatctaacatttttcacatttccattttatagttactaaaaccttatcaagataattttattttctagaagaaatgcattatactcaatcattttccatacagcagtaaattcaatctgccaagatccaacagccagtaattcctcaactcacaaatgttcattatataccataaataacagaaatattacttttatatctctcaacttagtagagtataagtatgctacctcaattgttttttaaaaatataaaaattataaaaatataaaacattttcaaatatctaatacatttcaaaatacagaatatattcacacatttttataagttcaagccatgttattaaagttaaacagcgctacttttatgctgaaggtgaattaggaatgtggacctgaaaatttatgtctgccagaattaaccagtttaaatctgcttagcttttcaaatggagtaagcggagagccactcaggagctagtttaaaaaaaagttttagctgattcatcagaaaaaaatacattttgtaattcctcctttcctttaaaaattgaactcatagttattttatttgaactccaaagtctggctaaaagaaagataatgaagcatttgtactttaatggtatgaaataaagtattagcatacttgtgaatattaatgtttttaaaaatatatatagtatcagccaatggtgggacttgatgagactgtcaaaaccaagtgttaaattggttatcagttccctcaacagttactgtaagctatgtgaacacacctctaaaacattaatattgtaagcacatgtaaacaactgctctcatgaggtaaactcaaatatctgagccttgttttttccaatgagtacaaaaattgctggaaacttaaacagaatttaatatacatcttatttatcactttgctccttgtactgcaattgtgagcacgtatacatttctaccagttattatctgattaggtcaaatttccagcaacattagaatatgtgaattataaatctcaaagctttatttgataatagagtatacatctttaaaaatgggaaactgacataaaaaggaagctcacgagctctgctttattaagttttattattacgcattttagataataagacaaaacagtagttatcacaagttatacaccaaaggaaaaatggttccattctgctatctgattccaatgcttagttttctgggaaacactggtatgcagagagaacctgaagcttgcctattactaactgaaacatttattaaagagctcccctaccctctgcaaactcttttaggtcttgttgccaacagatggttagctaatccctcaaaaccgtaaatggtctcattctcagtgcactgcctcagctctatgtagcaatgaaattctttagcatataaaaaaggttgtgaactaggctatggaaagtaattaatatttattgttatattttgtgggttttttagtatttatacagaaactccgataaaaaagtacattaaataactaattttctgatgtactctagagcttcaacaataggtcaatataatagatatctatttgaagaataatgaggacttgtaatgtttatctactgtttcttcttaatgattcatataatataatttccacttagatgtacctattggctcctcgaactcaccttactgaacacttaactcctttatctctctcaccacacaactccaaaactgatccccttactgaatctggcatcaccaactaactgctcaaggaagaaacctgggtgtcctccttgaaagctcttcactccccgcaatcccagaggttttgctgaccgtcttaacagatttctcccccataaaatctagcacctacaacatctgaaatccttctgcttcactcaagcaccactcccactacaaatgtgggtcatgatcatcatcacctcctgtctagttctcatttcccctaagaagccttgtctaacccaaatgtctgggttagtttatcacactagattttacaattgcctctttcgcggcctgtatctcctgacaaaatgtaggttctgtgaaaaatatggaccatgtctatcttactcatatattctcagtgtcaaaatgccgggcacatagtgggtactcaaaagtagttaaatgcataaaagaaaattaaaaatatattttaaaacaccaaaaacaaatcaattatcactcaaggtcccttgcaaggtccctcctagcaagggaactagaatttgcagttctgccaggctactcagcgggtaattaaaggtgtctttcagtgaagttactcctatatttagtctaatgggctattagtctaaagaacatatcagtggcactgatacagaaatggcattcctgtggcatcattcaatctgtcaaagaaaataatgaatttctactcaaatatatatttttaaatagaaatttacatacagaaaatatacaagaagatggttttatgttaactgtagctcattcatctagatatatacctctaatttctttagttacatcagtcgtactaaaatttaaaaacctgactgagttttaaagttcaattagaaacatttgttttataaacatatttaaaaatatcctgtgcagcagtagcataggaaacaaaaacttctataaaacactgactacttcatatacttgaaaaaaattactttttaatctagaaaataatgtgagtagctcacttaatttgcatcagtaatacacatatcattttataaattcttgaagtgatttgttgtttctacctcatcagttcaaattattatagcagaaacaaccattgctatttcaagagatcccagtgagtttcccaactgacttatcaattttaaatgcatttacaagcgtaaacagctctgagcactaatttgtttcctaagcagcttttgaaagggaataaatctaaatgcaacacaatcaggtgatacttttgaggagctgagttataataatttccaaaccagtccaaccaagattgtactacaacttgcttgctaatacaagttttgaaggccaacgtaattgacttcctattataaaaacatctttaagatacttcaaagatatccatgtcacttttttttaaatcataaagtcattattagagaaccaagaccttaattggcaaccaaaagtcttaatcttatttttttttaaagtatgggtttcttaacagatgctggagaggatgtggagaaataggaatgcttttacactgttggtgggattgtaaattagtttaaccattgtggaagacagtgttgtgactcctcaaggatctagaaccagaaataccatttgacccagcaatctcattactgggtatatacccaaaggattaaaaatcattctactataaagacacatgcatatgtatgtttactgcagcactagtcacaatagcaaagacatggaaccaacacaaatgcccatgaaagatagattggataaagaaaatgtggcacatatacaccatggaatattatgcagccataaaaaaggatgagttcatgtctaacacaggaacagaaaaccaaacaccgtatgtttttttttttttttagacggagtctcgctctgtcacccaggctggagtgcagtggtgcgatctcggcttactgcaagctccgcctcccaggttcatgtcattctcctgcctcagcctcccgagtagctgggactacaggtgcccgccaccacgcctggctaagtttttgtatttttagtagagacggggtttcaccgtgttagccaggatggtctcgatctcctgaccttgtgatccgcccgcctcggcctcctaaagtgctgggattacaggcttgagccaccgtgcccggcccgtatgttcttattcataagtgggagttgaacaatgagaacacatggacacatggaaaggaacataacacactggggcctgtcaggaagtagggggctagaaacatcacaaactggggcctgttgggggtggggggctaggggagggataacattaggagaaatacctaatgtaggtgacgggttgataggtgcagcaaaccaccacggcatgtgtatacctatgtaacaaacctgcatgttctgcatgtatatcccagaacttaaagtattaaaaaaaaaaaagggtttcttctcactagaggctatttagaaatgtatataggctgtatttctgtatgaatagtagtattttaaaaagctgttcctattcaataattttatttttcttttatcttttcccattttatctgagtttttatactattattctgtactttgaaaccctccctctaacccatctggcatgctatccccatctctatcctttaagttcctctttaaaataaattgctttaagaaaacttggttaaatccatcctaaaagtgcaaagactactcaaatgtttagatgtttagctctagttgccatcattactcttatttttttgagacggagtctcgccttgttgcccgggctgaagtgcagtggtacaatctcagctcactgcaacctctgcctcctgggttcaagctatcatcataccccagccccccaagtagctgggactataggcacgcaccaccacacgtggttaatttttgtgtttttagtagagatggagtttcaccatgtcagccaggctggtctcaaactccccacctcaggtgacccacctgcctcagcctagcaaagtgctgggattacatgtggcgtgtaatcctgggatcacagtggcgtgagccactgtgcctggcccactgttacccttttaaaagaatgattagattgtgtttaattcaccaattgtaggaacaattttttttcgtaacaaaaataatactccaaatggcactaaaaaaccccacgaatatcaaaatgcttaaagttctaccacatgtcccatgatcctctgcttttacccctagcctcttgaggaagacttgatttataacttggtagtaataagtaagctaggcaatcttttcctgatgattcaccagctggtcctgtcaaatagcactgtctctcagctgtctatgctgatgctgaatgcctttatacttcacacattcttgaatcatgtcatctgactccctcacactttttgtggtcaattagactatatgttgaattggattacatattccatttcccaaccaaaggactggctttacataacttggtgctccacagggagagcaaatataatacaaccatcagtggatgtgaagttgtaatatgcattatcacatcagtaggagattggaaagcactaagaaagcaagcactccaacctttacctcaaacttagagcagaattagggaactgggagtatgggtttgctaaatggtgggcttatgtgttctttcttgatgtttaaataaggcaaaaaaattaagtgtccagttgttaacatgctgtgaaaaaattttaagcacactgccttaaaacatgataaatgtatttgtgcaacaatacatgcagtattgcttcaaaatattttttggccaggtgtggtggctcatgcctataatcccagcactttgggaggccaagccaggtggactgcctgaccccaggaatttgagagtcgtctgggcaacattgtgaaacctggtctctagaaaaaatacaaaaattagcccagcatggtgcatgcacctgtagtcccagctacttaggtgggaggatcgcttgggccagagaggcacaggctgcgatgagccacgactgcgcctctacactctatctagcctgggcaacagagtgagaccctgtgtcttaaaaaaaagaaaaaaaagttttttatggaggctcacatttggcacagcctaagtaattttccaagagtaaaggtgtttttctttttgtgatgatcttatcttggatgctaagaaacggggtacaggtacttgaatatgtatgtgttgtccatattaagaaacagtaatcttgtgcttcaagcaagtgttcactgtaaaaatgggagggtagccaaattccatgttattaggaaagacaatggatgaaaatgttacttgtttctgaggcgcagacaaccattcctgataaaaggaataaaggaaaagccctgtgggtagaagtggcactcccacggactgaaagctggatccacactacaggtaagttttgtttagcccacaaatattttaaagagaaaaattaaaaacaaaatgagaggatctgacaggaactggctgctgaactgggtatgtgctcttcaattccaaatagttcttattatttccttaatgaaagcacttgtacctgtgaccctgcaggctccaaatccatgtccggtcacctgtactgtactgagactaggctggattgctgcagtgtaaatactacttgccccagtgatgattttgtgctcaattcgactagactaccatgcatttgatgagcaagcagtagccaagccataattcaggaagttattaccattattatctattgccaagcactgccactgagtgggaggatgctcagtttgtctatcctgtcatgtgaccaaggcagaagattagactaaaagtgggaaggcaaggatgaatagttggagtatctacttcccacaaaaggacaggcttctgcctcttaaaatttttatcagttgtcctaggtgtcttagaaagtactgtgataaagagtacctcatttcctcaccctcatgcctttagctaaatcaggagccacttaaatgactaaatagtctgccatattcaagtacccaacataccgtttaaaagtaaaaggtaactgcttatctctgccttggtagcagatagaatattggcaaccacatgaagccaacatacagatgggttcagaaacttgcttccgcacattttgagaattactgccctaaagaaagatttatcaacaggtggcctttagatggcagatttcagcttagagatgtgcatgccattttaaagttcctgtgtgtgctaaggattaaaacagttaatcaaagcagcttaatctaataaatgaattgtaaaggaaaatttcaatgagctaagagttcagagagacaatgataaacctcaccctcaacctaggaggccagagcagaactgagatcttttactgatagatgtatacattgcaaatgacttgtcaaaaataaaacctctctcagtgaattctactttttcattctaacagttggaaagttggggaaacacacctacataacaactgtttattactaaaaaggcacaaaactaatccaaactcaattctactccttaatgtagctacctgttttttaacagcaacgcccaacagaactttctgtgatgatggacaagttgtatgtataactgagctatgcaataaggtagccagtagccacaaatggctatttagcatctgaaatgtagctagtctgactgaagaactaaagttttaattttaatttaaatgaattcaatgtggctaggctactgaattggacaaggcagcttgtccataggtaactaagcaaaagggtacttggaaagagaacatggatagaagctatcaccatttcttttaaaaccgtaatgactgactgattgattgattttagatggagttttgcttttgtcacccaggctggagtacaatggtgcaatcttggctcactgcaacctctgcctcccaggttcaagcgattctcctgcctcagcctcccgggtagccaggattacaggcgcctaccaccacacctgggtagtttttgtatttttagtaaagacagggtttcaccatgttggccaggctggtctcaaactcctgatatcaggtgacccactcacctcggcctcccaaagtgctgggattacaggcgtgagccaccacacccagctagcgtactgatatattaatatgggatattacactcacaacagtacgatatagaaaggtaaatttgtttttctggtaaagtaaatcaaatttggactataaggtttaattaacattatgttacaaaaaattttaagccaataatccaatggacccaagtaaccctctacttgttccatattcccctaaaggatttaagtgaatgtactgacatttattctaaaaaaatttttctgcataaaattgtcataagacatctaaaaagctattcaaattaactgtaattgaattactagttttaaatatccacttacatggggcatatggagacaccaacttacagcaaaacaaaaacacaacaaagtttcctatgatagacaagggtaaaaagatgttacttaaacaaaagatagccttaaaaatgccttcataataataaccagatgaatgagggcacactattatgacaaagcaaatttaaggtttgaaagcaagaaatgtgataactctgtctctctgcctttcatctcctcaactgccgcctgctccacttaagttctgagaaagtgatctatgttcttacaaacaagacatcagactttgaaaattaccataacacgaacctgcttactgcctagatagctaggtgatcgctggtgagagcaaaagagggtggcaaattagagggcacgaagaatagttgggaggagaaataagagaccctaaatgaactgctctttaaagaactatggcttaaggaaaaaagggaaaagtttttttccttgactttttcttttaaaatgggagacatgaacatttctgatatgctaatcattcttttggccaatctgccaggttacatagaaaataactgtaggttgccaagctgatgagttagtaaaaaaaaaatggaggagagggtaaatagatgaattaagagggggaggctgggcacagtggctcatgcctgtaatcccaacactttgggaggccaaggcaggtggatcaccctgaggtcaggagtttgagttcagcctggccaacatggtgaaatctcatctctactaaaaatacaaaaattagctgggcatggtggcaggtacctgtaatcccagctactcgggaggctgaggcagaagaatcacttgaacctgggaggcagaggttgcagtgagtcaagatcctgtcactgcactccagcctgggcaacaaagcgacactgcactccagcccaggcaacaaagcctgggcactccatccaaaaaaaaaagaagagtgggaggtagaaaagacagaggctgtaagaagtgtgaaagaaattaagctggtctatattcactctcaactgagaattgagatctcccagaatatctatgactgatatttatccaatacactttgttaataaataacctggtaatctaaaactgacttttctggagaactttctaatatgtaggaattatattttatctatactgtatttattctactgtgtagtagaaataaaattgatatggtttcgatttgtgttcccacccaagtatcatgtcaaattgtaatacgcaatgttggaggagggcgctggtaggaggtaactggatcatgggagcaaacttccccccttgctgttctcatgatagtgaatctcacaaaatctggttgtttaaaagtgtgtaacacctcccccttctctcaccatgtaagatgtgcctgctcccccttcaccttctgtcatgattgtaagttttctgaggcctccccagctatgcttcctatacagcctgtggaactgtgacccaatctcaggtagttctttatagcaatgcaagaaccaatacagaaaatcagtactgggaatggggcattgctataaagatacctgaaaatgtggaagcgactttgtaacaggataatgcgcagaggttggaacagtttggagggctcagaagaagataggatgataagggaaacttcggaacttcctagacacttgttaaattgttgtgcctaaaatgctgacagtgatatggacaatgaagtccagtagtaggtagtctcagatggagatgataaatttattgggaactggggtaaaggtcactcttgctatgctttaccaaagagactggtggcattataccccggtcaagggatctgtggacctttgaacttgagagtgatgatttaggctatctggtggaagaaatttctaagcagtaaagtgttcaagatgtggcctggctgcttccaacagagtatggtcatatatgtgaacaaagagatgatctgaaactggaacttatatttaaaagggtataagacttcagaaaatttgcagcctgaccgtgtggtagaaaagaaaagctcattttctggggaggaattcaagccagctgcagtaaagaggagctaaatagccaaaacaatggggaaaatgccttgaaggcatttcagagacctttgttgcagcccttcccatcacaggcccagaggcctaggaggaaagaatggtttcatggcctgggcccagggccctgctgccctgcgcaaccttgagacactgctcatgtcccagccacttcagctccagccatggctaaaagggcccaggatatgtctcaggcctctgctccagagagtgcaagctgtaagccttgggggcttccacgtggtgttaaccctgcaggtgtgcagagggcaagagttgaggcttgggagcctctacctagatttcagaggatgtatggaaatgcctggatgtccaggcagaagtctgctgcaggggtggagccctcatggagaccatctactaaggcagtgcagatgggaaatgtggggttggagcccccacaaagagtccccattgtggcactgcctagtggagctgtgggaagagggtcaccgtcctccagactccagaatgctaggctagattcactgacagctttcactgtgcacctggaaaagctgcaggcacataaccccagtttgtgatgtaacctcactgtatcttggaagtaactaacttgttttttagaggcttatagacagaaaggacttgctgtctctcagatgagactttggactgtggacttttgagttaatgctaaaatgaattaagtctatgagggactgttcataagggtgattgtattttgcaatgtgaggaggacatgagatttgggaggggccagggacagaatgatatggtttggatttgtgtctccacccaaatctcaggttaaattgtaatccctaatattggaggaggggcttggtgggaggtgattagatcacgggggcagacatctcccttgcagttctcatgatagtgacttctcacaagatatggttgtttaaaagtatgtagcaccttcttcttctctctctcttcctccttctttggccattaagacattccttcaccttctggtataattgttaagttttctgcggcctccccagccacgcttcctgtacagcctgcagagctgtgagaagattaaacctctttcttcataaattacccagtctcaggtagttctttatagcagtgtgagaactaacacaataatgaaaatgttgatttatcaggataaatggaaaataatttgttcagccaaattaacatggtcaaaattatgaaggatattaagtaaaagaaatgttctcaaagtaaacagtaatataaaaactttaaagtattttctactgtctaaaatacttaaagatactgaagatcctctttaatatttgaagatagcagtatagaagtatgaatgaaggagtattccatgttaatcttgaaacactcctcccaaataacacaaccagatttcctcaatgtatgggctctaattttcaaaacagagtagcaattatcattcattaagttcatggtagatattattccaccagtatacgtttaggacagatattaaaaatgtcattaagtatatttgtatagcacttcagaaactggaaggtgcttttagtgtctattatacttcatagtggcaaataatcctttattacattccaatatgctatataatttatttattctattgtctttttcctcctctcatgtaagcctcatgattttggggatttgtttatttttgctaactccattatctctagctactagagaatttctgacacttagtagttgctcagttagtatttattgaaggaatatgtttaaaattatggtgaaatcaaccacagcgctttcattttgagattcagatttatgggtacacacaaatcattattttgccttactgttgtacaactcagacagtaacagcaaagagctaccagaaataagatacattaattgaaaattatttataaacagcagacactgtccccttgttaaaacgataaatccaaagctcagagtttaatgggtttattctccttatcaaattcctaacagatggtatgacaaattgaattagaataatgtaaattcactccaaccagaactgtggttaacattttgataactctgcaactttacttagctactttgatttcaatcactcatacatttttcatgtcttgccttatttaaaattcacatttaatgctcatttcccataatatagtgattaaatgtaacagcaaaatcaccttccaacctctaagtgctatacaaatataattatagtttttaatttatattcggtaataaacatggaaaaatttttcttaagttttaattttgaactgtaaacagaggaacagtatttctaaatatgttctaaatatttctaaaatgttctattgacatagttagtttaatgctccttatcttctaaaattcagaaactaggaagttcaacattaatgaacactttcttttctctcaggttgtcccagcatcagctattgaggctgataagcaaaagggagctgctatgcaatttcaggattggtgccgacatcttcacctgtgctcacactgtctgcttccactcactcataatcctgttctctctcttgaaagaaaggctaattaggataaatatgctagtctgccttacttggatggtggaagaacagagagcagtgttagaatcactgtttcattaccagctgacatctgcatggttcttctgggtaaggaccagcaacaagactgtcttgtgtgtgtcctttttcttcctagctcctcccatctctctgattaacaccaatccaataaaaatttctcaaaactatattatgttggcatattattgtttgtttagattacaatctatatggaaattgcatcaccccactctcttaggtcatcagaaatgagtatttttggctattccacagaatgtgtattcattaaatatcgtgagtagaaattatttaaaaattaagcatgtcttaggacctaaactttagtccttgcttgaatattcacatttgtgtaattcatttccaatcttgcctaaaagttacttaatagctcctaaattcctaagagtccatgtcattttctttggaagcataaatttaggcacctggacattttggaatcagagacccttggtctctaacctttgtgatttttggaatagttacccagactctctactcactttccttattcatcaaactgggataacacagaacctacttcatatagttgtattaagaataaaattaaaaactgtatgtaaagtgtacaatacctggtaaataatatccaactattatttagataagagacttacctaaaagtataaattccctaaatatttactgagcataaggtggactagtttcttccaactagagggtgacacttcacttcctctaaagtagagataaatctatctttgtcttctttcttcacaggccattattatttgcatgtaataagaaaaattacacttttagcgtctattatacttcataaaggcaaataatcgtttctggagaggtgatgtctctttatcagttttccagtaacagttactgtaagttatttcaacataaaaactgtatctttgagaatatttttgatccaagtagtagagactttcaatctagatttaagctgttttcatatagctgataaaacatttcttttcatctctgttagactattgggataaatgaactatgactctgaaacagaaagtcatttctatgtattctaataaatcattttaatttataattatgatattcttattaacaggatattctgggttatatactctgcttgttttcaactttaaatcactgatttaaaagaacacatttttatcaatgacttaaaaagcactcaagatcatcattatgaacatatatatactcctctgttgcagaggaaatatcctcacaaccaaaatttatgtgtgatctaaattttaaacgcaccctagacaccctaataaagttaggcaggaggaaaaaaaaatgaggctaccatcaataggacaggtataaaagtctggaaaccagctcctcatatatgggttgttagttaaatcacaagtctttaccagatattgttagcctagtttcaatgatttttctttaaaaatattctattatttaaacttatcaccaattaagcctactttcactctcacccatccctactcctgttcaaataaagtattactaccagagccatttttaaagtgttcaaactaaatgatattaaaaggaagttaagaaaaaaaaataaccttgagcttttattttcaagttgctatggtgtgaatgtgtccctcaaagttcatgttttggaaacaatccttaaagcaacagtgttgggaggtggggtctaataggtgattaggtaatgagggctctgaccaaatgaatgaagcaatgtcattattgtaggagtgggttagttatcttcagataacttttgtaagaaaccactgttggccgggcgcggtggctcacgcctgtaatcccagcacttcgggaggccgaggtgggtgcatcacgagctcaggagatcgagaccatcctggctaacacggtgaaaccccgtctctactaaaactacaaaaaattagccaggcatggtggtgggcgcctgtagtcccagctactcaggaggctgaagcaggagaatggtgtgaacctgggaggcggagcttgcagtgagccgagactgcaccactgtactccagcctgggtgacagagcgagactccatcttggaaaaaaacaaaaaaaaacaaacaaaaaaaatccacttttgttataaaagtgagtttagctctctcttgacttcctgccttctgccatgggatgatgcagcatgaagacccttgcccaaatgcagggccctcaaccgccagaactaagaaataaatctgtgttctttataaattacccagtctcagctattctgttatagcagctcaaaatagactaagataagtatattaaagatcaccaagctaaagttcagaattcccattaggctttatacttcaaagtgcaacttttagttaatacatgatgtttgccattacaggatgggaaatgagaaagaggctaatgccagattgaattagctctttacagcttcctgatcacaagtggtggggccccttacttaagtggaaaaaagttagtgtcagaagcaggacatagaggaacagtttatgttcccttcgagtaataaacaaccagttctaacttccaaaccaaatcaagaatttcatattgagattcaaattggtccctgactactgaccacaaacagtatatggtaaagacacggagaatcaaggaacagtaagattaaacatagacactaattcatctacgacttaaccaagattacagatttttcttgttggaaagattgctaaggagctgactttgggtctccttctagaatggttctagaaagaactaactgaaagtaatccaagaggctctacacagagagcagccagatacatacttactcatcaactagcaaggtcaacttacactgaaaactttgtttggtacagactgaatgtctcttatctgaaatacttgagaccagaactgtttcaaatttcagattttggaatatttgtattatacttactggttgagcattccaaataacaaaaatctgaaatctgaaatgctccaatgagcatctcctttgagcatcatgtaggtgttcaaaaagttttagatttttgattttgaatgctcaacctgtgtaacaggaattggtccaatcttataaaaaagttttagctaggtgtaaggtgatacacacctgtaatctcagcttcctgggagactgaggtgggagaattgctcaaggtcagcctaagcaacatagtgaaacccttattttaataaaatgaagaaaggaaaaaaagctaaacaaagctaagctagcttaaaaaaaaaaggttttttttcctctatggaaaagaaagcaagccaattataggaagagagaaatgctctaagaattatttgtacactattttggcacaagatgaaaactgatagtatgaaccaacagtattgaaaccctggatctcttcctgcttaggtctcactttgggctttgttaccttacagttgagtttcattactagctcctgaccaccctgggctgccttcctctttgccattccttagggaatggtagtgagttggtcattaaatatctttagagattttagcagtttgaactatgatgcatattagagtatttgatcactaatatgtatgaaaaagttcatagtgtcttagggtcaaggctgtaagtatttaggaagtttatgcacctgtcttctaatctgagaagcagacaatttattttaatggtgaattagtccattcttgcactgctataaagaaatacctgagacagggtaatttataaagaaaaggggtttaactggctcacaattccgcaggctgtacaagaagcatggtagcatcagcctctgcggaggcctcagggaactcacaatcagggcagaaggcaaagagggagccagcacctcaactgactagagtaggaggaagagagtgagggggggaggtgctacacacttttaaacaaccagatctcatgataactcactcactgactatcatgagaacagcactgaggggatggtgctaacccattcatgtgaattccgcctccatgatccgatcacctaataccagtctctgcctagaacactggggattacatttcaacatgagatttaggtggggacacagatccaaaccatatcaaatggtgaagcataggttaaaaaaaaatcaaccttgtgaacattaaaaaatatctgagtcctcaaagtgtgtttctcaggtccttaaagcatatcacctgtggcttggaagtacataaaatgtaggctcctctttctttttcattattgtaaagtcagagaaaaagccaacttagagccatgcccacagtacaaaatctgttcaacaagattagattgtcttttgttatttcttccttcctttgtcttcattttataaacgtatgcatgcacacagcttttaaacaagaggctaattgattaggaaaccagtgttgatttgatgtaagcaacaatccaaaaagtagaaaatattattattgtttactacaaatgtatggactcaaaactagcttaactgttattattcctcaagagaatttatttttactcagcctcttctcggagaagagtgctttagaccaaagctagcaattataaagctaagaaatcaggcaactgcaatactaccaaactacaaaaaatttacactaaactagtaaagttaaatgtcatttttaaaaagcccctcttacattctagtctattgacaggcattgtgttgggaacttggtagaggaaagaaaacttcaaaaatattttaaaagatttaccgacaacaaatataccttgttatttttctagtatgtaattattattatgacttttttcccccactgatttctaaagacccgtatactgatataaaaactaaaattttgtgcaattcaagatcctcatttccctcctcttttctaaaataatttttttttttttgagacagagttttgctcttgatgcccaggatggagtgcgatggcacaatctcagctcactgcaacctccacctcctgggttcaagcgattctcttgcctcagcctcctgagtagctgagattacaggcatgtgccaccatgcctggttaattttgtatttttagtagagacggggtttctccatgttggtcaggctggtaccgaactcccaacctcaggtgatccgcctgccttggcctcccaaaatgttgggattacaggcatgagctactgtgccggcctacaaaaatcttaaacaaaaaagttgtaatacactagctgatcactgtagtgaaaatgaaaatgcgtatttgtgagagctgagaaatgacaccagatagagaagaaattatttgactctaatttttcttacaaagattaaattgggattttaatatataaaaccttgaatatacatagaatattaaacgaaatagttctaattcaaattgagaattgtcttttacactgaagggaactatgatttcaaaaacaaaggacttattccatgcttacatgctgagatattatcagagctgaaatgttaagagatggtacctaaggtaatatttgtatattctctatataatgactgagaaccagttaaaaggcttattttaaaaagctagaaaagcaattacgaaaatttagggttctgtggaaaaattcgatcatggcatgaactccattaatgatgatttgccagcaaacactggttagaaaaagctggctgagagaatagcaaggataaccaattaggattagaacatcagccctattgctataaaataactattgacagtagatcaatggtattaagatcacatatactagaaccagactgccaggctttaaagtccaggaccaacagttatgagctgtgtgacttcaaactgtatttcttaggtcgccaaggttcagttctatcacatttaaaatagaaaatgacagtagtcattccaaagctatcttgagttaaataagataatccacataaggggtttagcacagtgcctggcacataacaacagcttgccatcaccactacagcaaccctgggcagtccaactttttggctgtttccttaaatgtaaaatacagggtttggactagataatttctaatgtctttactcatctaaaattaaaattctacaatgtatcaacaatatacaagccaactctatttccaaagaacataaatttggattttcaccccagcatgatttaagtactgtaaaagaaacttatttttaagatatccttttatttttatttaattttttagagatggggtcttgctatgttgcccaaactggacttgaactcctaggctcaagcaatcctctcaccttaacctctggagtagctgagattgtaggaacacaccactgttcctgttatgtcatcttttgaaattagctataatcactacatttattaaagctgaagttatagatattctatgtaatccacaagaaatccataatcttccatcacatactgtttggtgaccataataatttctgaataacaagtcctaacaggaatttcaaggtatataatcccccactatatttttttaaacaataagaacatttcataccccatacttagtaaacagaaaataaagatcatgaaaaatttcaaatatataatacagaaaaaaggaaagaactattttgaaactgtccaaaatctagaggtttaataaagtctctctactgatatgttacaactcaaaactcaaattacaggccaaattttttttgcaggaatattaaggttttttttagtatgactcataaatatctaaaccaaaaatcaattgtaatatgacaacactaactgcaccaacccaaataaatccttccaatagggcttttttttggggtttctttttggatttggagaatttttcttcatatatcttagggacattattaaaaaaattttaaaaaccttttcaggttttaaaaattaccaacagtgtgtgtgatcactgaaaagaggttaatctaaaaattttaaagtatttttccagataataagatcatactggtgagaaaagagttcgggctcatctcactcaaatacttgcataataggctcgaaagaataaaaaaattgttatgttacttcttaatataaaaaacacacaggtctgttaaaatctgacaattcaataagctctcaaaccagaaaacacgtttcccagtcaacactcatacttatttctgtattaggaaaaatggggttgttgcaggggtctttaaaaaaaaaagatttctcttaaattcgtaactctgttaactgcaccttcatttccagaaaccttatctttaacaaatctctacactattcatacttagcacaatttccaatcattgaagacattttagttttaccttacaatcagtacaaagcagctgtgttaaattcattccataagatcaaaactatactgtgtccttaccctcaatatttagctcaaaacaaatgtggcagaaggagagtgtttctttgtctgttcccagtttacaaacactgcaaatgttgtcatcattcaaatcaatgtttacaaactgctcctcttcgttcatagtgcccctattaagaaacagaaaaggaaagttacacaatttcatgaacctgcctttggggtagttccctttactgggaacttctaggaaataaggatgctgttcagctcatttaaagcaaaagctccatcaaacaagcatcgccatacttgcactccaacattgcacttttcctgtggaaagacacaaagctagtaaaacttaaagccaggccataggtgacactatgtccgtgtcttttttgtcctatagttgattgggttagtggcacctgaaggaaagagatttgccggcattctagtcctcctccttcgtcccccaacctcgaataatcagagggcttagcagcgaggccttttcagctaccaggttctgtcaacctagttaacgctgtgagaaacaggaaaaacgacctgcacgggacactgctttgctaacttcattgggggaacctcagatgcgcctcgcgaactcggagttgcgaagcttcgcatcgaacggagatcggcggcagcaaaatgcacgtgggtaccgaatacccggggagggcgtcccgccgtgtccggggcaactacaccgaaggccgagcggcggcttcacggtaccggccgggcaccgccggaggggcccaagccggagctgggagagccgcggcatcctggagcccggcgggcgggagagcctcgtcccatcgctccgggattcctcccagagggaagaaagcgtccgagggccacggcggccggtccgcccagcctcagcgtctcggggagccgggtcctggcccggccttcggcgttgggggcgcgcggccgcccccagggagtcgcggacccaagtccgtctttccgtcggtctgtccgtcggggcgcctggcgcgcagcagcgcgaggggccacggggctcggaactcgaaggaggcggaacgatgggactgggggtcggggctcaggtgggatgggagcagggctgcggggtctttaccgtccggctccgcgggccaccaccgccgttccgtgcggctcgggttcctccactattgtttccggccgcagcagaggcggccgccgcgcgcctggccccgccctctcccgccggctccatcccgtaaaggctgcggggagggtggcgcggccgcgggcacacctgcgcgctcgccgggctgctgtgggtccgcccctccgctcctgcaccgacgccgcaccttcgcctcgagttctcctgtgatcccgtgtttcctggccggagtttcttaccgttctctggaacgtagctcctcacacacccctcctcgaggtgcgtagatagacgaatccgttccacctctcccttcagcctagtgcaaactactgccccggggcgggggccgcaggcggcgggggtaggaaagccgcgggtggatggcagaacgggagaggtgcgtgggtggcactttgacttcaggagaaagaagcagaatactgtcactgaacttatagttaagtgccagttgaagtatctaacgaaggaaaagttcatattcaggtgtcatgatagaggcataatttcaaatacagaatcttttcaaatacattatttgttgtggggcgcccctgcccccaatatggtacatccctcaacgcccacgggaaaaatcccgaagccccacctcttatttttaggtcctgcttggttctcaaattctttgcttgacttttgtttaagctattctgttttttttagggtatggttcttgcagtactttcacttacattttccattgtagtcctcacagtaacctacagaggagaaacaggaactgttctctcatgttgcagcctacgagtaattgacccaggttatcacagttggttagaaaaaggctgggacttgaaccgaaggctactgacctaagatcaatgttattttctacagcatcatatgtatgtgttctggttgcactcacatagaaagagggctagcctgtcaatctacatgtaggcattcttgaactgatggttaggaatggactgtctagatcttggaaacttctgggccaaattagcactccagttatggcatttgtgcctcgcaggagcgatctgtgtccttgccacctaaattgtagtagatgaacaaacaacattgacattacttggtttcctgttagaaatgtagaatctcaggccccactcgagatttcctaaatcaatacttgcactttaacaagaccgccaggagattcctatgttcatcgaagtttgagatgcactaattgaaatgaaaagcctgtgctttttctcttcgaatttctcattctaggtaactacgactaagataccttgcatgttggattctacccatcttttcaataaaaagcattcttttaaaaaggactcttttaaagtgattcaataaaagtgttctaaaatcactaaaatttaaaaattgaaacaagttattttcacttctcagaattgtcttccttcctatggcatttcacattgtttacttgctattcttaaaactcttctctcttgttgttggctttttaaaaaaaatcaaggaataatttacagaaataaaatgcttccattttaaaagcattatttgatgagttttggcaaatacatacacttgagtaaccaccaccccagtgaggatacagaacatttccacagccccgacatttctttctgttcctttctggtcaagctccttcaacatgggatctaatttatatgacgaagtgttttagttttgtctgttataggaattcatatacatagaattaagcagtgtgtgttcatttgtgattggctattgtcatgcagcatgtttttgagattcacgatggtattttgtaacagtggtttcttttcactgctcgtcttagtcagtttgtgttcctataaaggaatacccaaggctggataatttatatagaaaacaggtttatttggctcatggttctggaggctgtacaagaagcatggtgccagcatctgtttctggtgatggcctcaggctgattccattcatgataggaggcaaaggagagccagtatgtgcagagatcatgtggcctgagagtgagcaagagagagaggggaggaaattccaagcttgctctctctttatttattttttattttttattttattttatttaaaaacgagttccactgggaattaagagtgggaattgattcacaccctagagaatggcaccaagccattcatcagggatccataactaagctccaaccccttgctctccactccccaaccaagcttcacctccaacgctggggatcagtggggcatgggggctcatacctgtaatcttagcactttgggaggctgtggtgggctgatcgtttgtgtctaggtgttcgagaccagcctgggcaacatcgtgaaaccccatctctaccaaaaaaccccacaaaaattagccaggcagggtggtgcatgcctgtagtcccatctactcagaaggctgaggtgggagactggcttgagtcctagaggtggatgttgtgtgagctgagattgtgccacttcactccagcctgggtgacagagtaagactctgtctcaaaaaaaaaaaaaaagagaaaaagatgtccacacgctaattcttggatattttgaatatgtatgtaacatagcaaaagagactttgtagatataattaaggttataaactttaaaataggttttcctggattattgcgctgagcccaatctaatcacatgaacccttataaccagagatctttctccaagtaagctcagagaaatgtagcaaagagaaagtcaaagtgattagaagcatgagagggacttgacccaccattgctctaggagcaaacactggtctccagctggtagccagcaaggaaatgggagctacagtctttaaactgcaaggaacagaattcagccaacagcctgcatagattgagaagctcatttgaacaatcttccaacactttgatttcagccttatgagattctaaatagaggagtcaactgaatcatgctgtactggaatttttacctacagaactgtgagataataaatgggtgttgtttcaagccattaaacttgtgttagttatgccagcattacaaagattgaatgtcgaaatttttaaagaaggttgagatttattttgggaagatgttactctagtggctgatcagcttgcttctttagagacttgtttgtaaaccttgtgagggtctacactatcattttgtaatatggatatcttagtccagtccttgaagagtggcttcttagaccctctattgtatgtcatgggtatttaataaagattctgcactctagttgattaaaactcaaatgactcctgtccctgtgagttccagcaggtgttcagtttgtagttccccagtaattgttctttcggtgatagttatttttttgccctggtatttaaattttctgtaaagtctcgccctatacatgcacagcttagtattcagccaaagacttaaagaaagagtattctgaaactctatagtttttcctttctgccagtttttattgcaaattccagcccgtcttagactccccaaactcaaatctttttctccccagagcaactttgcttggatttccttatgtggaccatggtctgaaagtacttccatgcataaaatcagggtaattataggtctcctctcatttgtttctttcctattatggatcacatgtttgtactgtctgtgtttcagtgtcctagaattcatattttctagattttggttgtctgctgccatgtgagatgtgcttttcaccttccaccatgattgtgaggcctccctggccaattggaactgtaagtccattaaacctctttcttttgtaaattgcccagtctcaggtatgtctttatcagcagtgtgagaacagattaatacagattcctaactaagcctaaagtcaaagtaatgtctgttttaggccaagagctaattacaaaactagttattgtatatcgctttatagtttataacacatttttgcacacttcactgagttactaaattagtaagaattgtagttagttaaaggtaaaatccttgactattcaaagacctaggctttgaacctgtacagcatatgactgtactgaatactataggcaattataaggcaatgtatttgtgtatctggacatactaaaggtatagtaaaaatactgtataaaagaaaaaaatggtatatcaggcactgattgtgaatggagcctgcaggagtaaaagttgctctgagtgggtcagtgagtaaatggtgactgaatgtgaaggcctaggacattactaaaaatcactgtagactttataaacactgcacatgtatactacactgtttattttataaatttttctttcatcaataattaaccttagcttactataaattttttactgaataaactttaattttttaaatattttgactattttgtaataacagctatattagtccattttcacactgctctaaagaactacctgagactagataatttatgaagaaaagaggtttaattgactcacagttccacaggctgcacaggaagcatggatagaataggaggccgtaggaaacttacaaccatggcagaaggcaaaggggaagaaagcatgtcttatcatggtggagaaggggagagagacagagcaagggaggaagtgccacccactttcaaataaccagatctcgtgagaactcactcactataacgagaacggcaagggaaaagtctaccctcatgattcaatcacctcccaccaggcccctcccccgacatgtgaggatgacaattcaagatgaaatttgtgtgagcacacagagccaaaccatatcattccaccctggcccctcccaaatctcacgtccttttcacatctaaaatcacaaccatgccttcccaacagtcccccaaagtcttaactcattccagcattaattcaaaagcccaagtccaaagtttcatctgagacaagtcccttctgcctatgagcctgtaaaatcaaaagcaagttagttgtttccaacatacaatgcggatatagactttggataaatacttccattgcaaaagggagaaattggccaaaataaaggggttacaggccccatgcaagtctgaaatccagtggggcagccattaaatcttaaagttccaaaataaactcctttgactccatgtctcacatccagggcacactgatgcaagaggtgggctcccaaggtcttgggcagctctgcctacatggctctgcaaggtacagcccctgaggctgctttcatgagctggctttgagtgcctacggcttttccaggtgcaaggtgaaagccgtcagtggatctaccattctggggtctggaggacagtggccctcttatcacaactccactaggcagtatcacagaggggactctgtgtgggtgctccaaccccacgtttcccatctgcactgccctagtaggtctccatgagggagaccaacaatatctgttagagagatcgcataatgtttttttctgaaaatcattgcatttcctctacaatggtgaaaatttttctcatcatttaaagtccaattcaaatgaatgtctgctacaaaaatatctctagtccttttactttcctgaattcccacaatgcttgctcatagcactactatttttagtatgtttttctgacatggccccatttttaaaataaaggatttagtatattcaatatatccatccacccatctctcacctatttgtttctcctcctatgttatctaattctctccaattagagaggtgctttttccatttagccaggaagattggcatatgtagccccaggctcaaagccttctggtaccatgatcctgaaggtactggaaattcaagatggtgtgactgattgactgaattattatttctacttcttcaccccctttcacttacatgtgaccttatagttcactgtagtgagcagaatatatttccccatcccaatgagatattaatgaacatgacagtgagcagagaccttaaatgtgcttgtgtgccttagcttggcttctttatctctgtcatatgtcacaagaagaccttcatccaggtatttgctggtccaagaaagatgagagagatgtagagatcaaacagattgaagggtccaacttgcagcctagctctgggttgccccagctgacctatagatccatgatgttggttattaaagtactgatatggtttgtctctgtgtccccacccaaatctcatgttgaattctaatccccaatgttggggaaaggaccttgtgggaggtgattagatcatggaggtggatttcccccttgctattctggtgatagtgagttctcatgatatatggttgaaagtgtgtagcattttcccctttgcactctctctttcctgtcactatgtgaagatgtgcttgcttccccttcaccttccaccatgattgtaagtttcttgtggcctctccagccatgcttcctgtacagcctgtggtactgagtcaattaaacatcttttctttataaactacccagtctcaggtagtttttaatagcaatgtgagaacagattaatacaagtactgggggttgtacaattatgcaacattttgcagtgatagctgattaatacagcgggattctgaatggccaaatgtgattcatatgcttgtctctgaatcaaacacaattgctagtactttaattggccaggctctattacatttccagctcttcctccattcccaaatgattgaagttggctcaggagtgggggtgtaggaattaaaatttgatctcaagatatggaagacaagtttcccaaaaggaaagtggttgctcttaccagaggaagggaattggtttgaaacctattaagcaggaaaaatctatctgtcataatctagtctggtactctttctacatcattatttattgctaaattttaagctgatttgtatgcagaaactctgccttactcatcttgtgtttaacacttacaaattataatgtcttataatttgtgtttgaatccagtaggattaagtttcactgcaagtaatataaaaatccccaagtaacagtgacataaaaagttggacatgggcagacatgctggctcatgcctgtaatcccaccactttggaagcctgaggcaggagggtcacttgagtccaagaattcatgaccagcctgggcaacatggtgaaaccccatctctacaaaaaaataccaaaaaaattagccgggtgtggtggcgcaggcctgtagtaccaactactcaggaggctgaggtgggaggattgcttgagtatgggaggtcaaggctgcaattagctgggattgtgccactgaactccagcctgggcaacagagtgagaccttgtctcaaaaaaaaaaaaaaaaagttgtactttatttttttctcttatgttgaagactagaattgagcagccagggtgagtgtggtgactctgattttcaaagttcttaagcatgcattttgctttgttttttttttccatgagacagagttgctccgtcacccaggcttgagtttagtggtgcaatcttgatttactgcaatctccgtcttctagactcaaactgaggtgggggcttggggaccacatctttattccagatgaccatatggccagctaaaagtcagggcttctaaaagagggagcatagatattgcaatttcagcaagcaatctctactgcagtgctcaatatttattaaatgaatgaatcacattaaaaattaaaactgattaataaacactaacaattaaatttttaatcttagatgaaatgctggattaaagaatatatttgaggctgggcatgttggcttacacctgtaatcctagtactttgggaggctgagccaggtagatcaccaggtcaggagatggagaccatcttggccaacatggtgaaaccccgtctctattaaaatacaaaaaattagctgggtgtggtggcgcacacctgtagtcctagctacttgggcggctgaagcagaggaatctattaaacctgggaggcagaggctgcagtgagccgagatcatgccactgcactccagcctggtggcagagcaagactctttctcaaaaataataataataataataatttgcttaaaaattatttttgatttccactgaaattgaacaatttggcaggcttatttcagttttattcatccattttctaaaagtgtaatccttataagattctacacagggagtctagcgctgctcttttggaatctttaaccctgaagaaaatatcactcttaaaattatggctcctctaaagcttagacaagcatccctctgaaagtttgagatacagatatttgcattaaagggatttattacctatagttttagtaatgctgacattatgggtaagctgtctgctgatccattgtcttgttttgcaagcagaacaaagcaaacctatttctagtctatggataaattctgtgttggcatttctgggagaagattgggagttaactaccaagctattgattttttttgtgtctgctgtgagccaaatccagtcttcagtaatgtgcacagtcccccctgttaaattcaaggtgataaaaggaaagtttagtattgatgtctgaagttagaaaagtctgtttcataatttaccagaggtttatttttatattccattgtgtaagtatcagtctttgggtatagaatactcaagctagaaattaaaatccagacgtgtttctgagtttactattggtgtacccattgaatgagatacaattttgaagtttgatgctgagagaaatatagcattgttaaaagaaaaaccttagacaaattaaatttaacagagttgaattgagcaagaagaaaatgattcgcaaatcaggcagcctccagaatcacagcagattcatagagattccagggatgcctcgtggtcagagcaatttatagaaaaaaaaaaaaaggaaagaaaagaaagtgacatacagaaaatggaagtgaggtacagaaacagctggattggttacagcttggcatttgccttatttgaacacagttggaacactgagcagtgtgtgagtggccaaagtatggctcctgggattggctgagattcagttattgccacagaagcattctcctaagttaggttttcagtcttgtctacctgctacgttaggttatggtttgtccaataggactcaagtatggaaatagagaggctttctcaggccatatttagttccatttaacagcattaagggtagtaaaaaaaagtacaacttttttgcttttctgcttttttaatttctactaaacactatttttttcacaaaagttaaaaccaatgaaaaatgaaattccttcattcaatcaatcattgatttattcattcaataattatttattaaatgcacattatatgtgagatactgtgccgggtattagttacacagtagagagcaaaacaaagttcttcctcttgagaaatttactgcttagtataagcaaaaggcattaagtaattgcatttggaaaggagtttttaatggcaatagaatacgtttgcatttcaattgctgtagcaccatgaagatgtctaagtaccacattggcaaataacttttatttcttgcttttttcattattttgctaaatcttatatgttaagcatattaataattcattatctatagtctgtaataagggatcccaccatagtatttgttttcaaaataactggaaaatgtaggtttcaaaactgaaaacattttagctattttgaaagaaaggcttccaaagtgtattatattcttttttgccatcttaaaatatataggagataatttatacattagcaaaatgtttgtgttagcggagggtaaattgttataaaccctgacttagaaattcagtgacttaataaacaagaaaatggtttttccctcatgtaataactgaaggtaggtaccccaggttggtagtagctctccttcacatggtgatttaaggacccaggtttcttccatcctctaggaccttgtcatctggtgcaaggtcaggattgcatccagatttcagccactggaaaggggggtagtgtggaggaagcacacctctcttaaaaggcccattcctgaagaggcaggcacataccacatctactcgtatttcacatttcattactgagaatttagtcacatggttacatcagtctgtgagggagatggggaaatgtaacctatttttgtgcctaggaataacgagtggataatttttagtagatgacgagctgtctctcccacagcctgaaactctggctgccaagtttctgtgtatatccttctcatactcatcctctctctgggcaagccccaaggagcacattcaccccttcagccagggagacaattcaaggttatagtcagctgctgcatccagctcagcatccataggtatgttgattggtgatgatcagtcctctcactcacatccataggtagctcctagttatctggtgacctataagttgaaggtaaaatacatcctctctttctgtcactccttcttcccaccagaataaatggtggaccagagacaggataactgcagttaaaactcctattcagaaaagggaagaaggagaaacacagcagtcactggtccatagcactgatagaaaccagctagacacggtgggggtcaaagacctctgtcttagtagtgaaggaacttccttgattgggccttatttctgctttatgggagtaaattcttgtccattggtctctggccccctgctgtgctatctggaagtaacttctttgcctattattcttcttgatcagatctaagagggctttggggaatttgttcctcttgaaagctgcatatattttacagcttagtttgtaggcccatagagtcacaaggctatttggttcttaggctcatagattctttagcaacacagtttcctcagtcttagtaaattctaagtttatttgcttccaaggtgcctgtaagcacaaccaaaacattttctggatgtattctagatagtacttcagcttttgcttttttgctctttctctgacatgttctttcacgttaatagcagctatcttgaggctatctgaataattaggctttactggggaggcaataatctgaccttttgccatttagaatccagaatcagtcagcttttcaggtgagagggtgtttttggccccttctccttgaaattattgtcacttttcaaggaggtcttctctgatcaccctatttgaaacttccacctggacccatcttactgtgatttttttaaaacactacttgtcactttcatatatttatatatatatacatatatataaatatatgaaatgatatataacatataattatttattatactaattgtttatcatctgtcttcctcctttggcatgtaaactccatgaggtttagaagttacattatattctctgatatctgtcaggtatagagaacagtgcctgctgcatggtaggtgctcaacaaatctatgttatgtgagtgaatgaataatttgagagtatgttgacttttcaggatctgctatatatcatgctatatgtcagctatgcaaatactgcaggttacagttattctttcctattgcacatagatagaatttttactttgctcatttcgcagtgtagggcaggatgagtgcatctgttttttctctgttctctccatagagacctagtctatgccaattatggaaattccattattcttgttggtgatcaatctaacaatggacaagtgaagcatgttggccagtgagggataagcaaaaatatggtagcatgaaggatctctagaaaaaattttgttttcctttcacttccttcctttctgctgtgggttttgtttttgtttttgtttttggtagagacagggtctcactctgtcacccaggctggaatgcagaggcacatcactgtagctcactgtagccccaaaatcctgggctaaagtgatcctcctgcctcaacctcccgagtagctgggaccacaggtgtgcatcaccacaccaagctaatttttgtattttgtgtagagatggggtttcgccacattgcctaggctggtctcgaactcctgagctcaggcaattcacccacctcagcctcccaaagtgctgggattctgtgagtattttttattctcatgatgatacgatgttggaacttcagcacctgtcttatgatcatgaaggcagacattgctaacattccgagatttaatgacgggaaagacagaaagaatctcaacccatatgacataattgaatccctgttccgatgttggaataattttctttttaaatgagataatacgcttctactttatttaacccatttgggtctactgtactgtcatttgttgatgtacctgtaaacatcctaactgatacagcagcagtatcttcagtagctactgagactaatttgctaccacactgcaactcattcaaccatttgtccattcattcatttattgagtaaattttctatatactaggctctatgcaaaacctagaggtaaaaagataaagatgcagtttgtgcatgtcctcatggaactgacaatagtggaacaattacaaattcagtaaaaaagtagtagttgtacaggagttccactagttctactgaatttgaatgatggtaagcatttgctctgtgataagtgtcctagacagataatttgtcttctagacatatgaagatggatttcacctatccatccttcaccatttgagggaggttctcttctgttgccacagaagaagtggcaccaatgtaggcaattgtgaccatattatttagttcctatctattgagacataaactcataggtggagaagattatatagcgttaaatgtgagatagcttgctagtttgcttctttcttctctatgcccacttataggtttttcttaaatacttagaaaagtagaactctgactgtggttagaatgcatacatcaaattgtagctgtttaaatatgctcctataggctcttggtcaattttgcgtgtatgcctggaaaataaattagaattgcagatcgttaaatattttagttttatcctctgggaaactagttttgtgtgtgtatgtcttttttttaaaaaaaaaaaccctacagctctatcaatctaagccagctatctagtcattgatatattgaacaattttatttgcaaagctgttcaatatctgcaaatggtgttagtggccaaatgagtatatgggctttataactcaaactcagtaagagatgttgtgtattccccactcctttttgataatttgaattcaaatgacaaatacatgtatgcttaggatgaaaaagtatgtcataaaatactaggttcactggactacttttcacattaggctcattgaaagtttatctagagaagtctaggcacagtggctcacgcctgtaatcccagcactttgggaggctgaggcaggtagatcatttggggtcaggagtttgagaccagcctggccaacatggtgaaactccgtctctactcaaaatacaaaaattatctgggcatggtagcacacacctgtagtcctagctacttgggagcctgaggcaggagaatcccttgaacttggggggtggagatggcagtgagctgagatcgtgccatataattggctataatttgtaagaatgttgtcatcgagtgtgtcacttaaggtcttagactgtgaatctaaccatatttagtgaaatggcttactgtacaaaaagtctaaaccaaaggttctcagggaacaaagcacatgtgcagttttaaaacaaagcagtgttttgtcccattgctgtgatttgtagtaatactttacccactctgaaatccaattaacactaaaggattaagtgtgagattttggtttatgctatttctgtatctcatactactccctcttttttttttttttttgagatggagtctcgctctgtcgcccaggctggagtgcagtggcgcgatctcggctcactgcaagctccgcctcccgggttcacgccattctcctgcctcagcctcccgagtagctgggactataggcgcccgccatcatgcccggctaattttttgtatttttagtagagatggggtttcacagtgtttagccaggatggtctcgatctcgtgacctcatgatccgccctcttcggcctcccaaagtgctgggattacaggcgtgagccaccacgcccggcccccatactactccctcttaataaacagtttccactgataatataaagggctggtataaaaatgtctttaaatgagtaagctttctttggtaaaattaaatcatacaaattatttttaaaaccttctgatatatacaatatttagcccagttttctaattttctggatgtaaaacaaaaggtttaacatacattccttgagctgttagtgctattgaaatcttttgtcccatttaagtcctaaacacttttggttggttgagtagcatgtgagtttttttgggtctcatagcatgctttttggcttaatttcaggtttatatatataaataaaggaattaagtaaaaataaaatttgagttactttttgaaagcacctgaaatcttggattggaatacgttgtctatttcaagtctaaagctgtggttttccccttctgctttacccttcttcaaatgttgttgtaatgtaattctttcctgagctttccctgtttccttaataatgcataggatggcaataaaaatagttttaaatctcatccctccatgagaggttagctccccaagtataagctccttttgtattgtacttgtaattgctcattcaatgttggtattgcccggtagactgtaagtttcctgagggccaagaatgcttttgcctcttccattgctgcttcccgagtaccttctgtatatttcataaccaaataatgaaaatgatatattccatttaaagggtcaaaaaaagtttggaaagaaagtttatgtgggaagaaaaggtaatatactgttttcccacagacataacaggagaattaatttatatgcatgtggaagctgttcaggagctactcttagtttgctttatgtatttaaagtttgttttaagtatctttaagtcttaagtatccctatttttttcctcttttctagaatgattttggaatttccactttttgttcttgtctactttgtgattaccaagttctctaatggtatttgacagttccctttgttttgatttgtgacatatgatggataaatatagttaacagatatagaggggaaattgtcacatttaatacatgtaaacctgtgattttaaaaagaggaactactcatatatatgtctgtgatgaaacaaaaaatagattatctcatatctagaaataagaaaaggttattaaaattcagaggaaataaagctagcaaccctgcctataccaaagaatattttgattttcatagtgcctttcgtcaactaaagaaagaaactgaggcaaattaacataagtcgagaatttatttgggccaaatttggggactgcaaccaaggagacacagattcaagttgccatgaatatatgctttgattagcagtagttacaagttggctttcaatactcatgtctctctggatctgatacattttgcatacctcacatagctcagacatctctgagctacttttcttctcatttcccctttttgattgagatcttcctcttctgaaagcattgataatcaacattttaaacgtagcttttccccatattgctaggaaggctcattcccgggtaatctctctctacattggagggaaagaggagaggcactacagcttaagaatttagtgaagtcttaggctaaattaactggcaacacaaaggggcagaggaattgggtctcaggatttcatccacttacaaaggaagtatggcgtgttgaataatttctatgcatctagctatcatgagtttagtttctgtcaacaaacactttagatagagaaatgcaaagcataattgatttaagaatcaaaaatatgacacaaataaggacaattactaattaaacaatttgaaatccaaatgtgagaaatattccaatacctgaaggtaaccagtcaaataaatcatataaggggtctgtctttccaaccatgggtcatcttgtagccatttagccttttgagtgatctttttaaactgagtttcaatttcttgtcctggtctgaagaaccaggtgactggctgcaggtcagcttcagttggagatctctgatgatggaagatgcctactcacgcagggctacctttttaaaatgagaaatgtaaatccatgagtcaatgcctttgagtttagctgcacaagtattgataagtaatacttgatatagcttcttccaacatgattacagggaatccaaaaatctcaaagttggaagccatgatatttgatgtcataaactcccaagagcttgctgttaaaagaatcctcaattaatttagaatttttagtgaaatgctttttaatgccttggcaataatgaagactatcatctttaaagagagctggtttatagactccttcatccaggcacatggggcttcctggtatcatttcaaagggaaaaagctgatgttttccaattgggtagaatgtaagttaagcaataacaatggaagagccttaggccagggaaagttaaatgtttctataagctttgtcaatttattttcttattatcccatttgtgtgttctactagtctggaagatggagggtagtatgtccaatggaaatgctgaaaaattgaccatatgttacaaatagactgagttatttgtctagtgaaatgggttccttggtcactgggaagactggaaggaactttccaagatagaaaaagacaagtattaaaatggccatggttaaagatgcaattgacaaggaaatttgtgcattttctttttttgttgcctacaattcaacatactaatcataattatgactgataacatataccaagatatattagatttttagtaatctcatacaattttgggacacacacatttatacatatataactcaaagctaaatgccatttcttatttgacagttttttctgtatgattttttacatactgaataagcccagtatctctctttggaacttccaggggttctttttgggatgtccaaaagttagttcctgatgaaatgacttaatttagaatttgaaatttgattttgagaagtttattaaatattaaaggtttaaaaccctggagcaaaatggaataatttatttagccaaagtgatgattaaaatatttcaaaaagcaaaaaaacaaaatgaaacaacaattccttatctttgatagagagattcagttttctaaacatcaagacttaataaagacagcatgagaccaatagaatctctctctccttctctccctatttttttttttttgcagtttactcaaaagatgaaatccttttactacttcttattaatactacacaaaaatcttattcacaagagaaaaccaaattctacctttgtattattaatggtgaaagtaattttaataaaaccctacaaacagatctatccaatctcaatcagctttaaccacacaagataagatttctataaaacttttataacctcttacaatttaattccttctttcccagactttctatatccatttagtttttttattcctttaatttaaaataaccttcaaataacctgtaagcaaaattacttttcctttaaccaaaaccatattctcctgcctttcttataaccttctttaccaaaaaacacatccttcttttcttatgtactctgtgtacaaaagaattcttttgtatctagtagttttagttacatattaactataattttacctcttagtgactctaattttcattgaacaacctagtaagtaagaaattttaattatgtatcaggtgcagaagctaggacaaaggacatagctgtgaagacaatacctagagactcttaccctgctccagcatggttataaggcacaactgggccagggaagacacattgggtttggctctgacatgcagctggtggcctaagtgctgtcaacatacacatgttttcaggcatcaccatggccacctgtctagatgtcagaatctaaaggctcaaaaccaaagacataggctcacaaacaattaagcaggtataaaaaaaaatcatggaagcaaccattttaggatgtttaaaacatctagcaaagacagtataaatttgtcttacctgtagacccaggtaaaaatatctaaaattaaatttaatttcgtcaatcttgaagacatttctattctgttttgccaacaatttaaagactagttttgtttacaaagattactaaagtcttacgaatttgaaaagtgtttagtcttatttacttaatttatgaacactcatttctttataagtcagtttggtaccatgtggacaacatgcaaacacagacatgtgcacatgtacacataaaaatacagatacacacaaataaaatctcataactttgattttaaaattccagccatgagactggtaaaattctctagtttaaaagaacagttagattaaactatacctctgtaaatggaacagttaatcagtccccagggtagcaagtttacatctcaaagcacagggaaagaatttaagctttattattattatttaaggagtttggatgtattacttagaggaagattaaaaatggataccaaggtaacacaaaagcataagcattcaccacaggactttataagagaacaatttcatttagataggtagcttctaatttagtctccattttctaactggaccactgagctccgggaggagcccattaacaaacagtcctgacaaaaaattagcagtttgcaggaggcagagcatcaaggtctttaaaaatcaaggatctcatctttacacgaaatcctgggtccccctaaagagggaaatgccttgggacggggctacacaatgtttccacagtgctactcactacaaagacattctcctggggctggggcggtgggtgacccaatgccatcagccccctctgtgatcagcccatttcccaagagagttttatcccttggtgatgagggttgctatatcctccaaatgttcaaactgcacctttcttatctaaagacacaaagaaatgagtggccctctgcagtaataaccattcatcgtaactgctgtcagccccttccaaaacttcagttctcgccagtgacttgccagctacaaagaggtcacagaaagatcaagtttcagctgatagtacaaggtaatccctgttactccaaaagccaaaaaaaaatcaggtaactcaatgcagaagagaacaaagctttagacctgagaggagccttcgtatgactctcagaactccacaaggatgacagaaaacctccaagcgaggggtgtgcatggcacctttttctgtgtttctcaaggggtatcgggatgttagaaggctcttctagacttcttcatgtggcactgaagatggtaaagggaaggaggagcagagtagaaggaaatggaagagcaagtcttagaggagccaatttggggagaactttctaaaaggccaatgaagttttatatttttctcagcaaaaatcatgccagcaagaaaggaagcaaacagagggagcaagcatccaattaaaaaggagttttaggagttttagttgactggaaaaattcctggaaatggatctaaaagggagcagaaatgccttgcttttaaaccatagatgttttaacaaacaaaaaccttcaaatcccttataatcagatttcagccaggacaaacaaaaagtaggcctctcattcaatttgtttggttctaaaatgtgatttatttttcaattgtgtgtgcaaatatattaatttaggaattttaaatcaccctcatttttgccattgtgatggccatttgggggtcatcttgagtcatgtgggtccatttacataggtatttgccagatggagcttcataggtattacatgaaaacccagctagtgtttccaagggggattgtcccttcagggaaagctcagttttgatgagcagtttcccataattttagaaattccttttcaaatatgaccaaggccaggacagtgtatcaggttgaagtgtgctgttttgtgagtgtcacttctcaaagagtcaccagagagtcatgacttgcttttcatgtgtcttgtaatctctgatcaccttatggtggcagagtgttcaagacgccaggcaaccagccctcgcacgtaccttctggctgagctgaaagtcatcacaggtattcttgcagacaggacctatgatactatgatacatcttgaacagatgttctgtatcttcataaagtctttagtcacctacagcacccaattgagtttggaggtagcaagtttctctcaaatttcagggtgagagagctcaacctcatgcaccttttggcttaaaactagcaggaattggtcacaaataaaatgacaattgtgaatcacaagcagtaagaagcagctacaattttaaaagaatgtaatttatgtaatttcaggccaaaaaagggaaactggcagtgttagactgccaatgccataacctgaacctcttgccatgagcggaggcagagaaggcagaaattttctgcagagtggtgtgctgcaccatgacctgaacctcctaccatggggcagaggtagggaaggtatttctctgcagaggttttcacctgaagctcccattcagagacggagaccaaagccttcagtctttaaaaacaaaaacaaaaacaaaaaaaaaaacaacaaaaaaaccccagcccaaataaagcctagacctcaactgagaagaaagaggttcagattcagtaggactcaccttttgtactcagggaaagatgtggagacagagaaacacagtaggtttgtgctggtgctgagtgctgagtccaggagggatcactaggtggtccagggtgtgaggaggttgctctgaatcctgacagctacaccagatatgttgacctaaagaaagaaactggggcaaaattaatataagtagagaatttatttgggccaaatttggggactgtaacccaggagtcacagattcaagctgccctgatggtatgctttcattagcagcagttacaactggattttaaaagaaaaaaggagtggtttttacattggttcattaaaataacataagctagtgattggctatacatattattctttgtatcacaaattctagaaccataaagataatgagtgagggtcacattgtgcaacttgtgataacattttaggtaatttatcaactagtctggaaactgcagagaagcaaagaaagaacaaaatgcctttaaataattgcccctgggaatgggtgcaccaggagtgtgctgaagtttcatactcatgtctctctgggcctgattaattttacatacctcacatagcacagaccgctctgagctacttttctttctcactttcttctaaggagatcacaagtatttcatgtattaccttatgttcatgacattcttactattgtatatctgctttatattgtggcattgaaggttcatctccatggtggcagagatgaacatgactctgagagcaatgactttcccatcaatcatgaaagacatatttattcaccaccattctgtattagggatcctattgtgtactgagttactgcagtacccacaagggagtctctgaaaattctgacccccaggacctctatagggcacacttggcatcagatttaattggaaaagcataaggcaagccatgcagcatgccagaatgacagcatcaggcacccctttttaataagacttcttgcagaagtcctcacaccaatcaaaaagcaaatctctggcttttaagttgacagttaaggtgcaaggagatgagacatgtacatatggtccatcttggcttagaagccttgtgtctccaataagatcctgtatttcttacaatgtttgaggcatcaattccagagtccctgcagtgagcctgcccagctgtgagagtcatcacacttagggatcccaaagctatggtttcccactaagtatttatagtttatatatagtttctctcctgtcagatgcaatttgtcatttttttaatcataagaaatattgcctagtagcaatattttcatcctaccctttgcagatctccagggaaacagtgctataaagttaacccaaggtcaagtttgttcatataggacaaaagattttgttaatgctttaaccacagataatgcagtcttttttatactattaggactaggtcacaggtttagcagatcttattagttactgatcaattgacacattttctttggttcttgataaaatgaagtcagttacgtttaatttactagctaacaaaaatattttccaacctttttgtcttataaataaaatcctgttgtactgtattttgtatttacgactataggaagagatagaattagctcttggcatttgtctgatagaacagatcaaatgcagggcagaatgcagccccactgttaggaattcctagtgagttaaaatgtaatccagagtgaaacaacctccaatgtataatcttgactctccatttacatctaaaaaggcgcagatgacgacagatctttccaggcatacagaaaatacagacataccccaacagtatttctctcagtttaacatttttccatcagaatgccttgtgactttttatatctgaacttcataaagcgtacgcatctcttagccgatgcacgtttaggacaaatttatatttgtgcctataaaatgtgatatggtatgtattttttaatgtataattttcatgtgataaaatgtgtagattttaagtatattgttcaataacaaaatgaatataccataacattataatagcaacataaccctacaccattgtcaataacaatgtaagctacatcattgttgagatatgaaacatttccaacactttatagtaaattcccttatgcctcttcctgggctcttttctcctcatcctgagataacaactcttaatttccatcaatatcaattagttttacctattctgagcttcatgtaaatggaatcaaagtgtatggtcttttctgtgtctgtcttcttttgctcaacatgtttttgtgattgatctattgtatacatcagtagttcattcatcaatgtatgaatataccacaatttgttaatctcctacctattgttggaccattgtgctatttccagttttaagctattatgaatatggctgtgataaatatttttgtatgagctttttgtggacatgttttcacttctcttgagtaaatacctagagtgaaatttctgggtcatagagtaggtacatgattaacattgtaagaaccttccaaacaattttctgaagtaatttccatttacctatatcattttgtgcactaatacacacatctttgcttgcattaggtgttgtcaaactttatttttagccattctagtatgtaaagcttcagaagaaagaaacacggcgataactttgtgaccttgaggtaggaaaatatttcttaaacaggacatagaaatcactaaccatgaaagaaacaattgaattattggattataaaattcaaaacttctattccttgaaacacatggttaaaataatgaaaagcaaatcacaaactgaagaaaaatgttcacaatacatatgcttgacaaaggacttgtatccagtgtctagaaagaactcatctctcagtaataaaaatacttgcaattgggctgggcacagtggctcacgcctgtaatcccagcactgtgggaggccgaggcaggtgaatcacaaggtcaggagatcgagaccatcctggctaacatagtgaaaccctgtctctactaaaaatacaaaaaattagctgggcgtggtggcgggcgcctgtagtcccagctgctctggaggctgaggcaggacaatggcatgaacccaggaggtggagcttgcagtgagccgagatcgagtcactgcactccagcctgggtgacagagggagactccgtctcagaaacaaacaaacaaaaaaaaccatgcaattgaatttaaaaaaagttcaaattacttgaatagacatttaacaaaagaggatatacaaatacatgacaggcacataaaaagatgtgtgacattattatcagtgaagttaacaattaataataaaataatttcagtgaaacaatgggagtttttaagtaatttcagccacagcatccaagtcacatgttgatattttgaaaaattcttgaggcttcaaaaagaagatgtttagtattttgttatataccacataagcgattatgaggtatattaatttattggttattaagaagtatgttcctcttgagcattttaccccctaacaagatgttttattgagttttagttatgtttgaggaaattggctgtcggttatggttgacatattctgcattataatttttcccatgtaaaatcatgataattaggctcccagttagcattttttcaatagaactaaccaagaacagattactgaaattaagacagagatgacgtattgattgattgattaattgaattgtacattttaaaggaagaaagtatttaaagaattccaatgcttttttttaggtgttaaatatttcttaaaataatctaataaacaatctaagttttgtctaaggcttctccagaaaaaaaagagcctgtgtacactaaatgtcttctattaaataaaagtggttggtcaacttgaagaggccgccaggattcaggaaatgggtaggcttctaatttacctctagagtaggtttctcaatcctggtattaatgacattttggcccacataattccttgttgtgggggttgtctggcatcgagtgatgtttagcagcatctttggcttctacctactagttgctagttgtgacaccctcacttgtgacaaccaaaactatctccagactttgctaactgtcatatggggaggagaccccctatacccaaaccccattgagtaaaactactctagagtttatcttaactataggtccattttgtattaatccattctcacactgctataaagaactacccgaggctggataatccataaagaaaagaggttttattgactcactgccctgcaggctgtacaggaagcatgactgggaggcctcaggaaacttacaattttaaaccattagaacttgtgagaactcactatcacaagaagagcaagggggaaatctgcccccatgatccaattacctcctaccaggtccctccttcaacactgggaattacaattcaacatgagatttgagggggaacacagagccaaaccatatcacacatcaatggctaataaatctgttctgagtcctctagactttgattgactcatgagtggactagaaatctttggattgtactgaagaatattgactggaatcaccttggtgacccaaaccaattagaattaaatttaatctaatttaattagaattcaattagaatcagaacatgcctcagagggagggccaggcatggggaaagtagcaattcactttaatttcaacttagagttgaaacatttcagccaataatttgttatttttttaatgaaacctgttatagttccacaaaaagaactctcaatcctcttacaaatggagtaaactcctttgtacctattgtaagtgtaattttcataggccttaaagtcatacatacaaactaggtaatattttatttttgggtaattgaacttagtttctattatatgccctatttcccctgatattgtaatgcaaaatctagtcatttctagatggatttagcctttgtcatacttttgtcatgtcatcctttgtcttgtaacttcaagtttaaaatcatgtcatttctggactttgcctttgcctcctgctcttcagggtggtattcctgttccctagtttattctagacaggatggaggtagggagtcagggaaaagggacctgttcttccgtggtcatggtatttgtcagtcttccagaaggccacctcctgaaatctctgcaactgtgagcgcctcagctgcataatgcccacttgcatttgggttaaaaattctagacccttgggtcctaagctgtctctttcaagtaccttctgagccctgcttggggaagtgggaggtttatttgtccacttctcacgggtgaccttaaggtaggatcagagccgtcatcagagtctctttgcccctcgatgtcacaccgagccacatctaactgttggcccaatgtaactgaccatttttgctctgatgctggggtactaagttgatgtggtagatctagaacacactttttccaaccttctctctcctcaaactatacactagggaagagtaaggtttcagtcttccctcatgtgcatttaacccttttgctgctcctccatgaattattttcatcctatcaggacgctttcacctactgggcacctaaacttgcgtggagatgaagggtgtaacttctttctgtaagtactcttccaaagtctttgctgttctacaacattgctgtttgaagctaaaagcaaaaaacatgacatcccttttattctgttctgcagtaatttttcctttcctgagtttgaaaataccttagaataaacaggatgaaggaaaggtctttgggaaacaagaaaattatcataattaaaaaaaacacatttcaatttttttgtcatgatatatgaacatactccttcctctccctccatcccagaaccagtcagatgccaacatcttcttaattttatttcatgcagctggctcttctcttgcattagtgtggctagccccttccactctcaacctactacattttgcagtaggttgctggctaggctctggcctcacactcttatttgcatcctacacactgaatataggtgaatctttctaataaatagtacaaaaacctttaatgacattatgttgcctctgagctaggttgcatttatatcctgcataatctgacaccaacctgttttataagagtgacctctcatttcatgaatctctagtttatttatgtagaaataaacactgaggtcttaatatgtttcagacaccatgccaggcactggggaatgaatgaaagatttcagtcactcaggtcgaaagattcttgatgataagaaccagtgaggaactgaggaaacaatgggaatcctaattactttgctaggtttcatgcctctgtgcatttttctaatataaccagggctggggaaggcagaagtcagagaaaatttcccagggaagatgaagaggaattattaaaatagagaaagataaggagtgtgttcaggcatggttctcagcaacagtaaacaatgaaggtatgaaatattatagtttacataatagcatttgttttttggtttgatgacccagcatctgaacatccttcctgcattggataattctctattttattaaagggaaacgatttccactgtagaaaccgaagataccaatgtgaaactagggcatgagcacacgacttaggttccatgaattagatggagactccctagactttgaattgagggtagtgataccaaaaaaatcaaaacaaaacacaatccattctggtgagcttggcagccgtggtgggaggtacatgccctttccagagaccctagtagtggtgccatgtttggtatcagtaggtcagccacgcaagctgcagtttctgggtctagcaggaggggtggtggggtttccaatgcaccagttctgtggtgtgatttgaaaaatgatattatttagattttgctgcataactgatcatcccataactaagtggtaagtcgcaaagactctcttcttgactgaactttagataagctcttctgagttctgtttttgaccatgccccagtgtaggcttataaaaactgcagactctcagcataaatgatttttgtctattttccatactccactcccacactaaaatttttgagcaaaaattaatatagtttctagcagctcaaagctacattcctagaatgaccctagccccttaaactgctcaccttggaaagctcaagactgatccagtccaaaccagtaataaacaggcccctgaaccctcccctcttagagcagttgtagtttaggaagcttgcagttgtaattcctttctcttcccctttgcgatgtagatcttctaccacccaaaattaacattcagggaaataattccccctctggtgcccagccccgtggcaccttgcctctaatttacaccactgccttctgccatataaatataagaagtttgcttctcctttagataagcaccaattaacaagatcagtttctgcttaagcccctgctcattcccccttccttagtccctcattgtccctttaacatgcccagtcacctctgcacaaatcaaagttcagttcatgttggaacctctttccctttgcagtgataattacggaataaagtttattcttagtgctttaaccagtgtctaaccagtgtctggatttatctttgacacaagtcatctcagaacttagtaacttatatttagcttatttatgatcttgtgaaaacagcagtttgaattgggtttaactgaacagctctgggctcattcatgtgtttggagttggctgctggtcgatgaggcagctctgtttctgtggtttggctgactgtcagctgaggctatggggatgactggaccgcatgtctctatcaccgaacagtccagcccagggttgttcacatgacaggtcagcagggttccaagaagtagagctcctgtgaagtctacattcagaactgatataaccatcacttctgccacattcttttggccaaagcaagtcacaaggccagcaccaaatcaaagggtaaagaaacaccctacctcctgatgggaggaacttcaaagtcacattgttaagggatgtggatacaggaagaaaaatgatggcaggtattttgcagactatctctatacaattgtacccgctgtgcagcctccaagcttgattctttgggccaggttttggagcctcctttaatctttaatgaagtctttcttacatccgcctaaattgtttctgtggcttacaattaaacatcttgttgaatattctgagtcgcacatacattctctctctctcttcacaccatgactctttcctataatgtttagagcagcgctgtccaatagatgtatacaagccttaatataacttaaaaaatttgggtagccatatttgaaaacatgagaagaaacaagtggaattaatattaatactatattttatttcacccaatatatccacagtgttatttcaactaatcaatctacaaattattatatcatgagatactttacttttttttattctaagtttttgaaatctcttgtaaagcttacactgtcagcacctctcaatttgaattggctgcatttcaagtcctcagtggcctctacaggctaccatatttaggacattgtttttccccagagtgagtcattgcttagatctggatatctgattcacaagtaaagaatgacactactgaagaggcataggaaacgaaaccatcatatactaaccatgaattttatactggactctttttttttttttgagacagagtcttgctctgtcgccaggctggaaggctggagtgcagtggcgcgacctcagctcactgcaacctctgcctcctgagttcaagtgattctcctgcctcagcctcccaagtagctgggactacaggcgtgcaccaccacgcccagctaatttttgtatttttcttagagatggggtttgaccacgttggccaagatggtctcgatctcttgacctcgtgatccacctgccttggcctcccaaagtgctgggattacaggcgtgagccactacacctggccacagggcgctattaaaagcactttaactaatatcttagtttgggttctacccctagcagagcttgagacacgcatttgggtgaaaataatttatttgaggaatgattccaggaagccaattaaagatatattattgagccagttattgctatggagaactggctcaattccatggacccctcagggagccatatagaatgaatttcagaattgttcctctgaagaacagaagactgaggcatttatttactgacccccatttctcactggctgagggttgtgcccatggatgttagtgccccaacgtttctggactgtcctatataaggctgaggaatcttatagcttcagaacgagtcctgaggcagaaaagctgagcaataaggcaaacatctggcataaggtttttccagtatgtatgggaattgtctgccaccagttggaactggaatcagtgatggggcaggcacatggcaaagcctctgctatgcatacattgtacaattgtcttcttttgttcaggctgctataacagaatcccataaattgggtggtttataaacaacatgaattcattttttacagttctagaggctgggaagtccaagagcaaggcaccagcatatttgatatatggtgaaggttcatttcctggttcatagaatggtaccttcttgctgttttctcacatggtggaagggaagaactctggtctcttcagacccttaaaagggcataatccccctatgagggctccaaccttatgacctaatcaccttccaaaggccccacatcctaatgccttcacattgggaattactttttaacatataaatttggggggaacccaaacatatttttcaacaatacttgtaaaacagacattataatttccaatttaaagaggaaactgagtataataaaaattccaatagtattcaagatgatatactcttaagtgacagagtgtgtttcttcacaaatatgacttattacaaggtccacaaagaacatattttttgggatttttttttccttttgggggaaatgtccagagattttttttggcttgtgtatttatttattatttcagaaatttagacaaatctacaaagtaggctttgtttgagttatctttaatcagtttttttttgaaagggtactgccataaaacagggtctcataagaatgtggtatatatatttaaaaaaatacacatttgctattgtgcttgttatattttctgaccttcaaaaagaaatttccaataaattttgtaagctcacttatttccgtcattcactgctgaatttctagtgcggagctcattttcaagtcgatattacgtacagcagattctccctaaatgaaagggactgaacacaccacagactggacagctcccattatctgaaatagccataagcggctttaatgctggagatttagtttaaaggattgtcctcctggaagactggctgcagttgtttgtgaggcagaacaaattataaaatgattatggcttcagagatgtatgtttctaaatgattgcttcgccagtccataaaatgtctgcttttaaaaaacaggtgaaatctgagagccttaagagattggatctttgggatattattaaaaatgtctttatagggtctggatgcaacgccaccggagtatataacttaccaagaatgctgacaggaagtcatcagcataaagaaagaaaagcaaatttaaagatgaaaaagaaaagccttaagaatgaacttagaatataaacctaagctagaaaaacagttggaaaagttcagcccaaactgttaaccatattttcctctgcaaagtctttagaattggggatagtcatgggtgtttgcttctgtatttacttgaatttttcaatacacaaacatgtatcgtgtacaatttgtgcaattaaaaataatcttaaaagaagatgccagccaggtgtgtggctcatgcctgtaatctcagcattttgggaggccaaggtgggcagatcacttgagctcaggagttcaagaccagcctggggcaacatggtgaaaccctgtctctacaaaaaatacaaaaattagccaggcatggtggtacacacctgtagtcccagctacttgggaggccgaggtaggaggattgcttgagcctgggaggcagatgttgcagtgagtcaagatcatgccactgcactccagcctgggtgacaaagtgacactctgtcttaataaaaaaataagaaaataaaaaaataaatataaagaaagagccattaatagactgagttttcagttttatcatgttattttgcctccaatctaacttacaagtctaataacacatagtaagtattcactagacattcactgaagagggaatcctcagaatttttgatgtcatcaacagtttcattttgcagtcagggatatatttcagcttctcagtgttttctaaaaatgtaaattttactgttaaatatgattttatgcctgccagactccttctatgcaatgaaagatacggtgccttgtactaacagtcccttatcagaagctttctagaaatcacaattatgaaaagctacctgaaacagagaataaatatttgaccagaggaaactaagtttttaatattttgttatctcccctgatctattcatgtatttaaaaatacttgttcttattatgaaagtcataataagacttttttgggggtcttgcttggcctgttttattggaattgcctctctctccccaatatttggctgaagtaatggggttgggtggccagtggctgccatattttgattagttgacttcctactcctgtttccagctaattgaacaaaacagggaatcttgatccaagctgagccaactagcttgtctcttgtggattctatctaagaagaataaagattcagtcaggcgatggtggtttctgggaatatgggctaagataagagcagccatattgggggccatgcgttgtttgtcaagcacaaggactcaagggaatgcagatgcccagaaggaaacatacacaggagacaacacactcagtgagagaaaagatgaagagaattgccatgttttattgctttcagatttaaatttcttgtgggacctggctctactactttctctttagttatatgggatggtcctgaatactaattgacttaagataggttaattttgagttttgcaaaaaaatttagagaatatggatatggaagaaaataaaaactgcccataaaaacatagccacccatacatgtctttagtgtgtttttattctataggaatgctataatatgcttctatgtaaaatttcctatctttttaaaataaaattatgaacatgttcatattttgttaattccaatcttggtaaatctcgctcttagtttattaaggtctgtctctgtgtggctaaatgtgcctgggaaaaaatattaccttgctgactggttgaattttgaattcattgttattaatcacaagtggatgcctggcaccatactgcaatttcctagtcctccacttgcccatcgcccagagactattttcttttcttttcttcttattttttttgagacagagtcacactctgtcacccaggctggcatgcagtggtgcgatctcagctcactgcaactttccctcccaggtcaagcgattctgggcctcagcctccccaatagtgtgactacaggcaagtgccatcatgcctggctaatttttgtatttttagtagagacagggtctcaccatgttggccaagctggcctcgatctcttggtctcaagtgatctgcccaccttgaccttccaaagtgctgggattgcaagcgtgagccattgcgcccggctggaggctattttcttcttgttcctctttcctcagtacctcctccctgttccttattctttgctgtgaccttgtttcccgttttactgggataataaaagccactagaaaacatgtcctgcattttgctgccagcattgctacccacccgcttgctctgtgcccacatactctgcttttcactagcagcaagctctctacactccagccctctccactccttcaccagtttctattctctctcatgtattcgaggacatcacatcagcagcaggcatctctcttcttgtaacatcatgttttctctattgcttcatcatttccatgagcttataaatgctattatttttcctatcttaagagagaagacaattttccagactctttattcccctgcagttactggatcacttctctgctcctgtaaaaggcaactcttctcaatagttatatctacttgatatctgcaatttgcttgtctctcattttctaatcaggcattcattctcgtgcctcttacaaaacagctcttgtcaaattgctattgactttcacatagctaaaaccagcgatggttgttagttttcatcttacttgaactgttggcagcatttgacagaggtgatctctgtcaaggtcttgctttactggccccctccttttaaggcttatttgcttgtccttttatctatttctaacctctaaccattggtgtgccctgaacaatgtctcaggtctcttctatttattttctacactcactttctaggtgatgtcagctagtacaatggttttaaatactatccatatattaaggactctcaaattgatttcttatgcccagacctctctcctgaacttcaaatttacatactcaaactcctattcagaatttcatcttggatgtttaataagtatcacaaatctctaaatagtcaatggccctaggactcaaatcttagaactttcctctttaaaatgatattattgagatgtaattcacatggcatacaaatcaaccatttgaattgtacaattcaagggcttttagtgcatttcagagttattcaaccattaccataatcaattttagaacattctcattatcccccttaaacccatcttggacatttcatatatatgtaatcatataatatgtggtcttttgtgtaaagactttagagtgttctaatttgttttatgcaattttttttttttgcaaatttgactgcatgaaagtgcattatcacaatgttgaccttgtgtgtgagacattgcacatgtacataaaaacattgaaacttcctcaataaatgaagggatgtcctttttgtacatctgcatttgtgaaagataaaacttcttgagatctcaactctctaggcgattacatatgtagtggtgacacattgtggtttcttatcgatctcatcaaaagacataggtcatctgtcatggtatttcagatgaccacagttataaaactggatgcacacaattaccaaccatagtgatatgcgtttatacattttcttttggacctatttatgaatatggttcatctgcttataactgttatacccatgtttctgttgttagtatatctgagttcttatgcttataaaaatgttattgttgcctattttattgtataaagtggcaactttatacaactttatcatgtattttattgtatactatgaagtattctgtcatgtttttatatgttgctcaaataaatcttttttacaagcataaataattttcttttaaagaaaattaaatttttttccagaattatatttttagaattttcaatttttaagattgtgatttctgatattatggtgtttagaattatgtcttttggtattatggcccaactctagtttttgtgactggcttcttttgtttaacgtgttttcaaggttcatccacattgtagtatgtacaagtacttcattccttttaattaccaaataatattctattgaacagctataccatactttatccattcaccagttgatgataatttggattgtttccatcttttagctactgtgaattcttcttctgtaaacattcatgcacaagattttgtgtggacacatgttttcacttgtcctggatatatacctaggaggggaattgccaaatcatatggtaactctgtgtatagaggaattgccagactattttccaaagtggcttggaattcttctattggtgctcactgcattggtgcatggcatctaggccatggttttaaatatcatctctatactgaagtctcacaaacttgcctctgaactcgagatccacatgacccattcattgcccacccacatatccatcacctaactcctgactttccccttcacctcacacccctgacctcaagcctgcttctcctcttatcttcttctcaattaatggattcccttcttccagttgctcaggacaaaaacctcagagttgctcttgactcctctcattctatcccatcccatatctaatctgtcagcaaatcctgtttgctctactttcaaaatactgtccccactccctgtctgcagtagctcctctgctaccaccctcatccaaatcactctcacttctttatcacattgttgcaacagcctcctaacttgccttccagctccagcttgattacccttcagtctattctcaacagagtattctggatgaactttaaataactctaattgctttccatttgagactatggcattggggatcgtgtctttcgggattattattggctctgacatgcgcacgcaggttgaaagtgccaggaagttaacattcccaggattaaccttccctctattatcttcatcctcagggtagcacaacactgaagtgtcttgtaaacagtgtcccaaaggtcccagagggaccaaaccccagttgctctcttcattaatgcatctttgaatggattttctttcctgttttgctttccacaactccctactgatgcttctgggataatctcacaaataaactacctatttctgtgtctacttttggaggaatccagctaagataaaaatctttataaagaaatcttgcctatatttctgtttcttagagtcgtgaaaaaggaaatactagttcaaaaagtgatttttttaaaaaactgagatttgagttctctgtgtcaaaaccaccatctgtatttggggaattccactttataagtcttggtgggagggaagagtttgtctctttcttagaagatagaaacaccatatattcactctgttagcgtctcgaaactatattattaacatatgactcaggtttggctaagcagatggatctttcctagattatgcttgggaggtagaaatgcaaagaagacaagatagggaagactcttccctgttggggttagttgttttaacaacttccagtttttggagaccacattggtggtggtgaccatggcaattactagaatccagtgcccacggggtgagcaacacaagctgcggcgtgaagggcagcgctgcccaatagaaatgtaatataaggccaggagtggtggctcaagcctgtaatcccagcactttgggaggccgaggcgggtggatcatgtgaggttaggagttcaagagcagcctggccaatgtggtgaaaccccatctgtactaaaaatacaaaaattagccaggcgtggtggcttatccctgtaatcccagctactggggaggctgaggcaggagaatcacttgaagtcgggaagcagaggttgtggtgagccaggatcgcaccactgcactccagcctgggtgacaagagtgaaactctgtctcaattaaaaaaataaataaataaaaaaaaagaaatgtaatataagccacacatgccattgaaaactttctagtagtataatttttaaaaaaaaaaagtaaaaaaagaaacaagtagaattaattttaagaatgtatttttcttaacccaaatatcccaaatgctatcagtttagcctgtaatccatttaataaattattgagctattttataattatttcttttgcactttagtaatctggtgtgtattttgcacttagagtacatctgaatttggattagccatatttcaaatgctcagtagctggttgtggctggggactcccatatcgggcagtgtaggcctagagctgagaggcagtgggcagccatgtcttcacacaagactagatctgtactgtgctgtgatttatgcactgttactttttgagtctctaagcctagtgtttcaattccctggttgcatttgttagcaatttaacatattttcatttctacctaaatcagccttagttaagtttctgttgtttgcaactaagaaccgtattgttatagaaatttcaatgagaagctttgtaggcacagacattcaaagaaatgaggagatctgggattgtgtatctggccttgttagaaattatgatagtttagattactgttcagcaaatattcattttctttttcctcctcctgtgggtagaatatattaccctgcctcatgatgttggagttgaccatgtgacttgctttggctagtaagatgtcagtggatataatgtgggcaaagtgctgagatgtgtttgtgcaatggtttcctggcctcttgtacttctgctgtcaccatgaggaaaatatgcccctgttagctggtgggtaaaggaaaatgaaaggtatgtgaaataatttgaagacctagttaaactcaagctaggttagccaacttctgtcaatctgaagttaaaagaaaaagcataagtgattatattaagccatctagttatgttatgtagcattattgttggaatgactgaaacagaactaaaggtagcaaaagttacagctagtaaacaatgagtctctaacatacggtatgcagaggagacacagtatattaatttattcaccctggaatgtagtgctaacgaagcaaagttttgaggaaggaattagcttgttagagtatagtaaaatgacttatataagacttgtagtaaatagtatttattgttaaaatttccaaatactttaaagaaatagatttatagttgtacaatttgcagttgtactgtttcctgcttaaggcattgattgaaaatcagtgacttttttttttttttggctaaagaaacatcacatttctttcagtcactgggttgagagagccaaaatatacacacagaaaaactgagtctttggtttgccaaaattcaatgtcagttgaatttacagccttgccatgtgtctgatacaaagtttgggcattgatgttatcctcagccaactaacacaggaacagaaaaccaaatgcctcatgttctgccttgtaagtgggagctgaacaatgagaacacatggacagagggaggggaacaatgaacactggggcctgtgggtcagaggaacaacggggacagggagagcatcaggataaatagctaatgcttgtggggcttaatagctaatgcatgtgggtgcagcaaatcaccatggcacacgttaacctatgtaacaaacctgcacgtcctgcacatgtatcctggaactcaaaatcaaattaaattaaaaaaaatctattactttgtcttgtttaaaaaaatgagttacaagttacatacaataaaatatgcccttttgaatgtgtagtcctatgagttttgacaagcactcgtggttatgtaatgatcactactaccatgatcaagatatagaatatttttatcacctctcaaaaaaaaaaaaataaagtttgggcattgatccagaagaaatagaatgccgagaatgaaagtcttatatgggaggaacttcaactcctccatgagttttattggcaactgaagccacctttctctttctgatgatgctctttcccctttgcttgaagactcttaacaagccctcaaacaggctcatctaagagatttacctgaccagagaccctaatttgtcttttgttccatccataccctcttctttgtctctaaggccttaaatgttgtcagatcccaacatgttctgggagccaatttaaaggcaaatttgcaagatgacagaatagccacaaaaaatggcaaaactttgttaatttatatcagacttgtgggtttgtgtgtatgtgtgtgtattttgaatgagtaggccaaagagggaactgatgagtttagattaggctgattttagcatcatggggacaactcactgagattctggattcaatgtgcctcttcgagctgagagtaattctaattgtttgtttggttgacttgtcttggaaacaaagccttactttgtgtttgaatcagaaacaaccagtggcattattattctaaaaaacaacagatgttggaaaagaagagcaaattgaaccaatttctcctcactcaaaagttttttgtagtagatatagattggaaagatatagaaaagtggagaagaaaataaattgggaatgttcaacagtgtaagtgaataagatcaggcatataattcatgaagcaatattgttggtttttcacgcaatggaatactcttaaatcaaatttaaaatctggtaggatgttgaagagaaaatttcattcgttcattcattcattcattcaaatgttcattaaatgtctaatatgttcacacacagtattttaggtactggagatatagcaataaactagggaaattaaaattttctcatgtaacttatattctagtggagaaagagaatgaacaaatgcattaaaatatacagtattttagaaggttatctatgtaatatgaaccccaaagtatctgagacaggtctcgatttagccaaagttaggcatgcacttgtgatacagcctcaggagatcctgatgacatgtactcaaggttattgggggtacagcttgcttttatacattttagggagaaatagtacatcaatcaatacatgtatgatttacattggttcgacctggaaaggtgggaaaactcggagccatggcttccaggtcataggtagatttaaaaattttctgattggcaattggttgaaagagttattatcaataaaaaggaatgtctggtttatgataagggattgtggagaccaaggttttatcatgcagcatgacatctccaggtagcaggcttcagagagagaatcaattgtatatatttcttaccagacttaagatctgtgtggatgttaattctggttggctcttcctgaattccaaaagggaggaagaactaatgaggcatgttcgaaccctgcttcccgtcatggcctgaactagtttttcaggttaattttggaatgcccttggccaagaggagaggtctattcaaatagttgggggtgggtcttagaattttatttttgtttacagtaagaagaaaataaatctgcttaaatcaggattgccagggtgtagaagagtacaatttaaaaaatggttgtcagggatgatgtcaatgagaatgtcacatttgagtaatagcctgaaaggaggcattaaagtagccttgtgcatctccaagggaagactattctaggcagaaaggaccaggggaaagattgggaccttaactggccccatggagtggagtgaaccagggtgatactagtaggagatgaagtcagaggtatagagtggagcctgattggattatttcccacaaagatgaaagatagagaattataagcagtggaaaattagaaaccaacattgaagttagacacggtcagaagtccttcatcagcaagtggaagtggattccactaatatccaggattaggtccacgtcaattgtgaaggcagaaataagttgcataaataactttatgaacacccaccttgcctcctcctgctgccactgtgctcttgtgggggaatttcttcatatcagttgactgaagaggaaaacatttgattcttttaaaaggatggctctgcatatttgtgtaccaaccagaaatagattgctgaggcattactttcaccctcaggagtggtcctgaaggacagtcaaaatggaaattctcccagtgaaaagaaatgtaaacaatttatcttattgtccactttgtcagttagtagaaagccccaggtaggtatctgtactgattgatgggcagtggttaatggtataatcagattgtcagggaactaaaagaagcagaattgtaagattgatcacaaagtgtttggggaagacacttacgtatggacccctctgaatggggtttctaagtgtgactaaatatagcctatgcaactgaccaacaaaaggctacagtgaatgagggttttaattatcaggtggacaagatgactcactatttatgtcagtcggcttttttctgatttccttagtacttgattaaagtggatatggtgacagacattaacacatggactttttctaaaaaatctgaccttgtgtactttccagaaacagcaattaaccctgagcttgtaatacaataccatgccctagggagggcagcgagacttctatcaaggaggaggctatgacactttagattttaatttgcctttcttcctaattttgcttcagtaccactatacatggaatgactattttatacacagttatgatattccacccagcctttctctgatcaaggaagtctattttacagtgaaaaaaaaagtgaggcaaagggtgattgacaagtctaagatacccaaggctcagaaacagctatggccgatcggagtctcacatataggagagcttagacacaacaccttgtgactagaggactgtctcgtaatatccttttagccaaggatcagtatacagtattatatctcccacaaactgaatacatgcatttggagacaataggctggaagtgagagtagagtttctccctaaataggagaaagtgaaatcatttaataatctatttacaaatgttttacctcccatcctcactctttcagactttgaagattttagtattgaagagaagaatgtttccttctgggatatttggcaaatgattcctttaaatttgaagcttagactatagcttacccattcagagttcttcatgccactgagtaaatgagcaaaaggaagttatgttgttaactaattaatcctgtcaagggttttactacacagtgggcacagagagaggcatgatagtgctaaaataataatctgaatttcctcctagtacagccatgcccaatagtaaaatttaacaaaagctaaaacatcactttataagcagaataatctatggctcaggtattatactttaggactaagattctgagtcacctattggttgaagggccacgactatctggagtgctggttaaagacaaaggcacatggaataagtaatggagaagggcagtcataagtaccttattttatcaactgaaagctttggagtttatcaaagcatccaagcctccctttctttgtgtgtgtgtgtgtgtgtgtgtgtgtgtgtgtgtgtgtgttttaaatttttttattttttatttattaatttattgtttttagagatcgtgggtcactgcatcctccacctcctaggctcaagcgatcctccacctcagcctcctgagttcctgggactacaggcacttgccaacatgcctggctaattcttgttttctttttttaatagagactaggttttgccatatggtctagtctggtctccagctcctgggctcaagggatcctcccaccttggcctcccaaaatgttgggattataggggtgagccagtgtgcctagccacttcatgagtctttaacttttattccccagctcttatcactctatagcaagctgtgctcatcttctgaacttacaactagaattagcaaatgccctaagaggaaaagtcatcctgactgtcgggttcacctctcagcaatatcctcctttcttggattttggcccatcaagagctctcaatcttggtagctttatgacacattcaaacattttttttttaaatccttttttttttttttttagttttctcagtaagatggttagtctaaaacaatctagtctgcatttagcaaactcataaaaccatatttctttttcttcatagcacttgtctcagtttgcaattagaaactcatttctgtgattatttgctaaatatctgtctcccccacaacacataattagaaactgtacccatttttgctcactggattatctatggcctagcacagtgctaggcacatagtagatacttaatatttactgagccaattaatgaatgaaccttgggcaagttgcttattattaacaatagcaagcacctgttaagtgcaaaacactagggtcaagttatggcacttagagtctaaagacttttgctcttatatcctaccatttatccttatcagtgaaacaacacaaaatgttttgccttcaggatcaaggctttttcagatatagattttaaatggctcagaaaggaatgaatatttgaagaaagaattgtacatagatttaactggaagggaggagcccaaggaatttaacacagaaatggttagtggcacagaccctaaatcacagtcactcagagaatgggcactgatgatgtgaaaaagttagggttggccaggtgcggtggttcacgcctgtaatcccagcactttgagaagccaaagtgggtggatcgcttgagtttaggggttcaagaccagcctgggtaacatggcaaaaacctcttctctactaaaaatacaaaaaattagccaggtgtagtggcacacacctgaagtcctagctacttgggtggctgaggtgggagaattgattgagcctggggaagtaaaggctgcacaagtgcgccatgattgtaccactgcactccagcttggattaggggactgagaccctgtgtccaaaaaaagaaaaagttagcgttaagtgcctggaaaaaggctacatggtgtcagcgtctaagtatcaactgaatagagtttaaactgagtcaatacagtgggaaaatggcctgtgatggccctaaagaggggataaggtggccaggtgtggtggctcatgcctgtaatcctagcactttgggaggccgaggcgggcggattgcctgagctcaggagttcaagaccagcctaggcaatacagtgaaaccctgtctctactaaaatacaaagaaaaaatcagccaattgtggcggcatgcacctgtagtcccagctactctggaggctgagacagaagaattgcttgaacctggaaggcggaggttgcagtgagccgagattgtgccactgcactccagcctgggcaacagagtgagactccatctcaaaaaaaaaaaaaaaaaaaaaagaggggataaggtaaacaagtcaatagttagaaacacaaaatacgaaaactgttaagtcacagacctgaaatcctgtgtattcttgaaatttgcgcatgtgtattttgttttttatcattttatttcatactttatagacagactaacttaataatttatgtttgctgtcttcataagtatttatatctgtgcatacatatagatacatgtaatttagagtatatataggatgttttattaatgctttcttggttgtaaatccttgaaagaatgctaattactctgtctttatttcttaattaggcactatgcagcctccataataactactagctgtgaacgagagcactataaaagttactcaagtaattgccttacaaactacaactctacttaagtgacaagtcatatgagttaaataaaaattgtaaaaacaaagtagcctcctatcatattaaaagtccttcagcatttcagttcctggatgatggtgaaaggagctatacatttagaaatagaagaatatccatcttagatgatcccaaagaagcatcttttcatgcttttttttttttttttttcttaagatactggatctcactgtgttggccagactggagtgcagtggtgtgatcatagctcactgcagtctctgaactcctgggctaaagtgatcctcctacctcagcttccggagtagctgggactacaggcacgtgacactatgcctgactaatttttcaaatttcttgtagagatagagtcttgttttgttgcccaggctggtctcgaactcctgccctgaagtgatcctcctgcctcagccttccaaagtgttaggattaaaagtgtgagccaccaagccctgcccatgatcaattttaacttgcaattgcatcatttaagaaaaaagttttattcagagctagtagctacagctagcagtacattcagttgctggtaacaaaatccagacagactgaacaaagtagggatcatattctctcatgtaaggacaaactaaaataaagctgtcctgggctggtatgaaagctcaaaggttaatagagaaccagactcccatctttctttagggcatggctttgcatcttcaagcacacatatgatgtttcctagaactccagacattgtgaacatgttttaggaagaaaggggaaaaaataatgacaaaatttagtcagcctcctttaaagcagtttccaaaaagccatccgtgacttcttttacctcattggttttcagtcccgcaagggaggatgggaaatatagtcattgagctgggcacattatcactggaaaaaaatttgaattctgttaagaagaaagggcaaaacagattgagttgtgtcacagagattcaaaatgttctaaaaaatttcagggcaagaagctatttttagatacctaatatatgccaggctgtctactacatcccaggggacaaagacaaatatgagattgggccttctctcaaggagctgactgtttagtgggggtggcagactgtaaaaaacatatctcaatttatgtcttgataatgatattccaggacttttccttagttcagctaaagagggggtcttttccccacagccacaaaaatttaggctcgcagacgatttgaagggagagaataatgggatttatagggcaaaaaggaaaaaagggggaacaggggctctctgcaaggtcagagttcctgctagtgtgctcaccacctcacagcttgaattccagccacccaggaagcctggctgtctcaatgagaggtttgatggggtgttgtgggagagcagagataaattcaatcaaacctggaagtcttggcttctgggaagtgatattcttagaatctaatcttgaaggatgaataagagccagatgacattccaggcttaggaaacatcacaaagagagctaggataaggaaaacttcattgtttaccaagaattgctagcagctagggattattagaaggtaaaatagagggtagttgcagacggcatgattttatattttaaaaaacccatcatctgagcccaaaaacttcttgaactgataagcaacttcagcaaaatctcaggatataacatcaatgtgtaaaaatcacaagcattcctttacaccaacaattggcaagcagagagccaaatcacgaatgaactcccattcataatctctacaacgaaaaacagtatctaaggaatacagctaacaagggatgtgaaggacctcttcaagaagaactacataccactgctcaaggaaataagagaggacaaaaacaaatgggaaaacattccatcctcatggacaggaagaatcaatatcgtgaaaatggttatactgcccaaagtaatttatagattcaatgccattcccatcaaactatcattggcattcttcatagagttagaaaaaactatttaaaacttcatatggaatcagagaagaccccatatagccaagagagtcctaagcaaaaagaacaaagctggaggaatcatgctacctgacttcaaactatactgcagggctacagtaaccaaaacagcatggtactggtaccaaaacagacttatagaccaatggaacagaacagagacctcagaaataacactgcacatctacaaccatctgatctttgacaaacctgacaaaaacaagcaatggggaaaggatctcctattcagtaaatggtgctgggaagactggctagccatatgcagaaaactgaaactggaccccttccttacatattatacaaaaattaactcaagatggattaaagacttaaaatccaaaatcataaaaccctaaaagaaaacccaggcaataccattcaggacataggcatgggcaaagacttcatgacaaaaatgccaaaagcaattgcggcaaaagccaaaaatgacaaatggacctaattaaactaaagagcttctgtacagcaaaagaaactatcatcagagtgaacaggctatcaacagagtgggagaaaatttttgcaatctatccatctgacaaagggctaatatccagaatttacaaggaacttaaacatatttataagaaaaaaacaaccccatcaaaaagtggataaaggatacgaacaaacattctcaaaacaagacatttacgtggctgacaaacatatgaaaaaagctcaatatcatgatcatcagagaaatgaaaatcaaaactacaatggaatactatctcatgccagtcagaatggcgattactaaagagtcaggaaacaatagatgctggcgaggctgtggagaaataggaatgcttttacactgttggtgggaatgtaaattaattcaatcattgtggaagacagtatggcaattcctcaaggatctagaaccagaaataccatttgacccagcaatcccattattgggtatatacccaaaggtgtataaatcattctactataaagatacatgcacaagtatgtttattgcagcaccatttacagtagcaaagacatggaaccaacccaaatgcccatcaatgatagactggataaagaaaatgtggtacatatacatcatggaatactacgcagccataaaaagaaatgagatcgtgtcctttgcagggacatggatgaagctggaagccgtcatcctcagcagactaacacaggaacagaaaaccaaacaccgcatgttctcactcataagtgggagtcaaacattgagaacacatgtacacagagaggggaacaacatgcactagggtctactgggggggtggggggtgagggaagagaactcagaggatgggtcaataggtgcagcaaaccaccatggcacacgtatacctatgtaacaaacctgcacattctgcgcatgtatcctttttttttctttagaaattaaaaaaaaagaaggtaaaatggagcatagaggtgaagaagtaaatatgttacaaaaggcccagttttctagttgagtaaccaggctatggaaagccttggaagagatttcaacctggtaattccaccatcgagcagaattttagatgtctcattgtggatgttctgtggaggaagcatcaaaggagggaaaagttgagagacagagagtcgttaggaggctatttcagtagtcaaggtaagaaagaatggaatcctaattaggcagtagtagtaggaatggggagaaaaaaaggattacagaaccatgtaggaggaataattagtgaatgaaaagatgtgggtagaaggggagaaaggaatttagaatgactacaagatttctgctttaggaaactaggtggatgatggcaccattaattgtcattataaatgcaagagtgggaggagcaggtgggatggggatggaggagtgggagaaatattagctcagttggaacatgttgagtttgaagtgtctctgtagaaatacttagtaggcaattagatataaaactcttaatcttgtgattaaggtgtgtattaatcagggtttgccagagaaacagaatcaataggagacatatatatgaggagatttttaatgggaattggtttaagtgattatgaaggccaaggagtcccgccatctgccatccgcaagctgggggaccaggaaagccagtggtgtaattcagacggagtccaaaggcattagagctaggggagcctacgatagaagtcttgatctgagtctgaagacctgagaacagtggggttgggggcaatggtgtaaggtcagtctgagtcccaaggcctgagaaccaggagcactgatgtccaagggcaggaaaagatggctatcctggctcaaacagaaggagtgagtttgcacttcaccacttttttgttctattctggctctcaacagattggataattcatattcacattggggagggtggatcttcttcacttagtttactggtttaaatgttaatctcttccagaaacaccctcacagacacacccagaaataatgttcaccagctatctaggcatccctcagcccagtcaagttgacacataaaattaaccatcacaagtccaccccttgtcaacttggcaccagtacctatctccttaaaccatacttaacctccagataaaggcaataacagggtaataagcacctaacatgacacagatattttgtgtgtaactctcatctcttccccagatgagaaataaagtctttgagtgatgtttactcatcttctcatattctataacttaaatattatgatgtaaaattaacaatattaaaacactaatactgttaacatatatgttacataataaaggaataagagaggaaataagacaatgatatttacttaatatatctatgtctacatacaaatgtatttctaacaaaataaggggggacatcttcataatagtctgtttctgtaactggtcttgtggtcatagcaggtatttataatgaccatatttactatttattcttttttctctttgctttcattgagcatcttgactggtgcttctgcttagtagtccagatcaatcactccagctaatactatgactctgttatagactcataggcatgagaagctcaaagtggccagatgacagtcttaacttccagttcaatgggatcattgttgtgcttcttggtggaagctggaactaagatttttaggccagcagagcataaggttgtgggaacaggaagaaaacattttgggtaatattgagtagtgccactcccatttccaccccttgattcctgtaaaccccggctatcagagaaacagaactgtatgttgtacatgctcaattttgtggcttagcaggtcagataacacctggtttatgatggaggtctcaggttgtgtggtaacttgatagcccatggtcaagtgtttggcttctcctaactcccagtagcagtcaaagagctgtctctcaaaaggagagtacttatctgcagatgatggcagagctgtgctccaaaatcctaaaggtctgtgctgcagttcatctatggcagcttgcaaatgtctccaaatggcattcctatctgtcactgaaactgcaagcaccactggatctgctagatcctatgttccaagtggcatagcagcctagacctgttatagagctttcttttattccagagcccacccacaactagcagctttttggtcacctgatagatgaactggaggaacacacccaaatgaagagatgttgcctttaaaatcccaataggctctttagttattgtaccgctttcttgattgggaggggtcaaatgcaacaacttctcctcgaccttaaaagggatatcttgataggccccacaccactggacccttagaaatttcactaagatagaaagcctctgaattttagttggctttattttttatcctctaacgtacactctgttaacaatatgtctagaatagttgtgactttttgctcactagatccaataagcataatggcatcgatgtaatgaaccagttgatatcttgttgaagggaaaggcagtcaagatgcctgttaactaaattatgacatagggctggggagttgatataattttgaggacagagaaggtatattgctggccttgccagctgaaggaaaactacttctggtgggccctatggacagatagagaaaaagacgtgccagatcaatagctgaataccagctatcagaggatgtgttaatttgctcagtgaatgaaaccaaatcttgtacagcagctataattggagttgttacatggctaagcttatgataatcatactgtcattctccaagatcagtctgtgtcttttgcacaggccaaataagagttttgaatggggatgtggtgagaatcaccacctctgcatctttcaagtctttgatggtggcattaatctctgcaatccctctaggaatgtagtattgcttttgatttactattttcctaggtagaggcagttctaatggcttccatttggcctttcttaccattatagccattattttacagatcagggaactagtgtggcagttctgccagctgctaagtatgtctatttcaattatgcatttggaagtgggaaaataaccacagattgggctcaggaacccactggacccaccgtgagacagaccagagctaaaaccctattgatcacctgaactttataagccactactctgataaaggcccacagtgacatcttgggtctcctgtaattactgtcatttcagagccagtgtccagtagtctcctaaatgtctgattattttcttttatcccagtgcacagttacaatgataaaaggtcctatgtctctttagggaaggttaggagaaagattaacagtataagtttcaggtaatgtactgtgtttttccttgaggggaggttgcctccacttcattcaaggagttctaggtctgtaaactggcccaagtctagaaattgattgaagggcaatgtctgtctgtttttgaaatacacttgacttagaacttttctgcttgttcagatcaagtaagaatttgtaggctttctatttcatttgtaggaacactgtgattagccaatgtcattgctctgcaagggtcggaatattctgactgctgctttgactctactgaccgttagggtaactacatccatcttgcctttggtggttgagtgccagacttggccctggccacccaagattgaattactcccattacgttaggtgttgtcaaggaggctggggcttccttcacaaacttatttctgaaagtattggtgaagggtatgttttctggaccctcctagtgtgggtgagtaggtctactctaatatactttaatattttgctctccctaagcctttgaataccttcctctccattaaaccaagggcggtcaagcatctccaattcacttatggtgggcggtggggcatgggccatcttttggctcatgtttcagtcaaccagcccaacaaactgttaagcccttctttttaaattaaattaaaatttttgattgtgaatggtgtaaaacaaaactctaaattcatcactcccacccgtataaatagccaggtattcctagaactctttacagagtaatccatcttttcctcactatagtcagcattgcagtatttgtcatacatcatattctacgtagagtctgtttgggggctctttactcttccgttagcctgtttgcctgcactgcactactacaattgctataacaattttaattactgttataatggctacaatttaaaaatatttaaaatttttaaatatctattttaaaattgtagccattataacagctgtataattataatgtaacaattaaaattatagcggttataggacaaatctgatatcccatttttcttccttaaaattgccttagctatcttggattttcctcttctttagtatgtataatcttttaaactctgggaaaaaaacctgtcaagactgggattaatcgaagtaaaattataatctgggtgagaattaatctttatggagtcttcctaacatgaagatggtatgtctattcatttatttaggttttctttaatgttttcattttacataagtttcataattttctacataaaagttcacacagatcttttattacatttgtttttaggtaccattttttatctgtttcgtttgtatatatatttttaaaagtaaatcttcacttatggctcctatctagaaataaaattgatttttatatattgatctaatatctaaaaaattaaatcaagccttttattaaaagatttttttttgaagtagatctcgctctgtcacccaggttggagtgcagtggcatggtcctggctaactgcagcctctacttcccaaggtcgactgatcctcccacctcaccctcctgaatagctgggactacatagcatgccaccaagcctggctaatttaaattttttttttttgtagagacactatctatcttgttatgttgcttaggctggtttcaagctcctgggctcaagcaattctcctgccttggtctctcaaactattgggattacaggtgtaagccatgacgtcaggcctagagtcctttctatcactcttagctgcaacattaactgcagaatttctgcctagtgagcttatatcaataaatttagcctgattcaacattttgttccttccaccattatcccacattcataataagcgttcccacacatgttccccagatttctgcttgtataaattagaaagctcaagcagtgcttttaaagtgtattgcatctcctcttggctcacactttgtatatcacctttaggaatctcctgggacttcagtctagttagaggtctagaagcaaaaagtgggggtgggtcctgaggagaatcagcattgtcttgcatggcaactgcctcagggaaggccattaccatttcttcagtcaacagaagctagctcctcagatggagttgagaaggtcactatcactgtggatgggaaggccacttttgctgcgatgagggaggctaattccactaaggatgagaaggctgcttccagtgacactgggaagacctctttcactagcaaagaagaatcattagaatgtagggacttaatgtctccagcttcatcagtctttccacgcagccccatcccaattcatagaatcccacttttttcccaaacgatggcctcactttaacagtagacattctgcgagactgcaagttcaacttgtattataattcagccaactgaaggatgaggtcctatgtttgattttcagcaatttcagccctgtgactacaggagataaggaactccttctgagcacacatagaagctcttaggccatttattcagcacttgagttgggaactggaatccctgaggtcatcctttaaaaaacaaggcaaacaaaacaaaacacacttctagacattaggagcaaagaaccaacatccttatattccttagttttcaaaaaatgttggatgttatgatatacagtcatttagctctttgattctcataaatggttgattaggactatccactgcagatattttgcatatcatagccatttactattagtgctctctttactactagaaatagaatttaaaaacctgatcagattagtaatccaattccataaaccccagaacaaattcacaacagttattcataaaattatgttcctctagaactactcttagtacaaaagtctatgctagtcagggttctccagagaaatagaaccaatagaactcaaaatatatgaagatatttattgtggaaattggctcaagcaattatggagaccaagaaagtcttacagttttctgtttgagagctggagaaccaggaaagcaggtggtgtaagtcctggtctcactctgaagacctcagaactgaggataaaaaagtggagaggtttaagtcactgtccccgtcccaaggcccaagaaccagggccatgaatgtctaaggggaaagaaggatggatatccaggctcaaacaaaaagtgtaagtttatcctttctctgccttttcattctattcaggctttcagaagattggatcatgtgtacccacattggtgagagtcatctctactcagtctacttactcaaatgttactctcttccagaaatactctcactgacatacccagaaataatgtttcaccagctagctggacatcccttagcccagtcaagataacacataaaattaaccatcacagggtgaagaagttgatttttaagttatagcatatagctggtagttgaatgcatgtgaatagatgagactgcctttgggtagagggtatccagagaagaccatgaagttaaggcaaaaactctgctaacaccaacatttaaggaagaaacgcctgttaagggcaatgagaaattattaaactgagtggttattaagttaatcaaaataaaacaaaatagatttactaagggcttcccatggaccaggcactgtgctgtggcttataattctgccatgaacaaggcagacttagtcctttttcttcctggagcttagagtatagagatgcatatatttaagagaactttaattgagaatggaacaaatgaaaataatcggttttttggagctcaaaaggtagtgaatagagctagtttggaaaagccttctctacagaagtaatacttaagctaatacctaataagaagataatttggtgtggggaggtggttaagaatcaagacaaaagtatacagggtatgcaacagtaccacatgactaaacactctgaatttggtgagaacttggtgcatttgaattgtgatatcaacatggtagagtacaaaaaagaggagagagaagtatgtgacaaacctagagagatgggggtggggctagttcacatgagaccaaatagtccatgtttattccatattccaagggaaatagaggccatatgcaatgaccattaaattttctttttgtcgggctagcttcccactgcttcatttttaaacatttcctcttctaccccatgagatcttggttgaatttccagttacctggatcagtttgccccccaggatagctaataagaggactccatccctttggagaccaaagattaggttagtggaaatatataatttaagcagggctaatcatagtctaatttatgtggatccttggatgaaaaattttattttcctctccttagatttgccagcagacatcttgatacaacataaagaaagcttgtttgagacaaaagccaagtggaggcaaagtagccaagagatggggagacagtagtacagatcccagttatctcatttgattcttgaattcatccagagtacctcttggacttttcattttctaaatgccattgaatttatttttgattaatctaatttaaattgggtctctgccatgtaaagttaaaacaacatagatatcaaaggatacaatgtaaatatatagaaataaattttatatcttaaaaagatcatttataataacaccaaaaataaaatacatagaataaatctaatgagagataggcaggaactcaacaaaaaaactatacatttaaaccaagagaaattaaagacctaaataaatggaggactccaacaagttcaagggttagaaacattattattctaaatatttctgttttaaaaattgatctataaaagccatgcaatcccaatcaaaatttcaatctatgtatgtatgtgtatatttatacaaaatatataaaatatatatatacacacacacatgcacacacacatatacgcacatatatgtgtgtgtgtagagctgattctacaatttatagatttttttttttaagccaagcatagccaagacgatcttgaagaaaaaagaagaagtcatgttaaatagctacagcaattaaggtagtgtggtattggcacaaggatatacacataaactaatggaacaaaatagggagtttagaaatagcctcagacatataaggtcacatgaaattacaaaagtgtcacactgttttgcagtgggaaaaaatattgtccttaaataatgattctgggtaaattgggtaaacatatgaaaaaaatggaggttgactaccaatgtacatgatacagtacaatcagttttaggtggattgtatctaaatggaaatggtaaaataataaaactttgagaaaataacacagaatacttcatggcattctggtaggcaagtttttttttcttttttgagaatataaaaagtattaaccataaaggaaaaaattgataatttagactactttaaaattaggaatttcaatcatcaaaagacctcattaagaagtggaaaagacaagtcaaaggatggaaggaaggagataattgaaatatatatgttatatatatataggtttgataaaggactattagaaatcaaaaagaaggcagaaacctaatagaaaaatgacaaatgactttaacaaacacttcacaaaaagtacatccgaatagcaaataagcacatgaaaaggtatcttattcatcagggcaatgcaaatcaaaacacagtaagatgccactacacaatcatgagaacagctatcattaaaaaaactgacattatggccagcgcggtggctcacttctgtaatcccagcgctttgggataccaaggcaggtggatcatgaggtcaggagtttgagaccagcctggccaaaatacaaaaattagctgaacatggtggcgggctcctgtagtcccaactactcgggagggtgaggcagaagaattgcttgaacctgagaggtggaggttgcagtgagccaagatcgtgccactgtactctagcctgggtgacagagcgagactctgtctcaaaaaacaaagcaaaacaaaacaaaaactgacaatattaagtgttaatgcaaacagggagtaattggaattctcaaacgttaatgagagttcaaattggtaaaaccacttcaaaaaattgtgtggcaatatctactctatagctaaacacataatcctatgatttagtagtactattcctaggtgtattactaacagaaatacaaacatatgcataccaaaaggcatgcataagaatgttcttagtatctttgtttacaatagccttaaactggaaacaattaaaatgtccaccagcagtagaatgggtaaatacattttatacaggggaaatccacagagcaataaaaatgaataagctattgccgtgtgcaacactgagggatgagtctcgcatatgtaatttgagagaaaaaacccagatccaaaaagcacagtgtgtgataccacttacatgaagttaaaaaactagtaaagttgatgaataatgatggaagtcagcatagtaagttcttttggggtgcggctgggagactgttcgcattctacttcctgacctgtggcagtgacaagggtagatttcacacggtgaacattcatgaagctgtacattcataatctgtgtgcttttctgtttgtacgtgatacatcggtaaaaaggttacttaaagagaaatagagtttcaagagggaatgcatgtattggactgggtacttaattatatttgaatttgtttccgaataaaatttcaagataattaaaactgagattttttcttttccgcatttttttcttaatgttgcatggtctttaccctttcagtcagtggcatctggtatttaagaggaaaaacagattcagccaagcaaagaagacagtttattatttggaaatcatggaagtaataaagatcttaaaagcctaagttttggccgggtgcagtggctcacgcctgtaatcccagcaatttgggaggccgaggcgggtggatcacctgaggtcagaagttcgagaccagcctggccaacattgtgaaacccccatctctactaaaaatacaaaaatcagccaggtgtggtggcacgtgcctgtaatctcagctactcgggaggataaggcaggagaatcgcttgaacctgggaggcggaggttgcagtgagtcaagatcatgccactgcactccagcctcctgggcgacagagcaagactccatctcaaaaaaaaaaaaaaaaaaaaagaaagcctaaattttgaatgaagagcctaatttttgagccagaaaaagtttttataaatctccccaaagcaagatttttagcatcagttttcaaagcttgcagaaagaatacatcaaatttatccataaacaacacagcagggtgagaatagattcaaagccagtttttctgacacacggagattttttttgtctttttaatttttaaaatattcttggcatgtgagtggagcttcagaattaggaaaaggaagcgagatagttagcagctggtgtgagtttctaaagctggtagggcaccattttgtctcttaagatttaggtctcggtagggttggggttggaggaattataggaatgtctgacccactgggtgaatctgagagcagagtggcctatatcttgctctgttgggagtagcctggggagactacaattattgtagagaagtcttatgcccgctgtggtcctggagtgacagaagagcagtggttcagtgagatgttgggctgaccgggtttatgggcagactgacagttcagcacacacatgcagtgtggtgtggaaaaaacaacaacatggaatacaaaaattagccgggcgtggtggcctgcacttgtagtcccagctactcaggaggctgaggtggtagggttgcttgaggctgggaggttgaggttgcagtgggctatggtcatgccactgcagtccattctggatgaaactgtgtctcaaaaaacaaaaaaaaaaaaaaagggaaaagcaacatgggctctgaactctgaatgtcctaagagggggaagaaaggtgcgtgcaactgctaggagatgccagtcacatccaaagggctatggaggaaacgaactgatacatgtaaaggccttagaataaaagccagttgttgttgatgtagtttttcacttctgagtgcatatggggctttagaactaagttgttaataataaagagctgaaaacaagtgcactcattaagaatatgatgccactcacagctgcatacttcaccctctctctgcctcagcagggcaaggattttgagagactaaaggtccatttacaaaaataagaccagaactttgggacccttaacctttgtaaggcaaggactgtgctttatttggttttgtacaccctctgccccagtgactgggcatggaaagctatttgtgtttgttgagatgaataaatagatgcagtttccattgggaaaattacacaagcaataatgttacccctccaacaatttctgcaaaatagttacactacaaggtatcacatgcaaggggcccttcagatcagcagataattgtgcctttggaaaatgaaaatcaaaatcaacactcctggtatagcttccccatctctatagattctagtacttactctctgcctgctggtttctcaggcatgagaaaaggctttttgactccaagtcataacactaaaatactcatagttctggctactattggataataaagttggcagtgctattcaggaatcatatctgagtgtggtttctatgatgggaccaatcaactgtatatttactacacgttttggagccctctgtaaaacaaatgcttgtcctgcaatttctccttattacagaatgtattctgaataggtaatttggggtttccccttcaaattcactcctccttacccaaacacattcgctgagtatgtgtttgtgtttgggtatgtgtgtgtgtatgtgtgtttatctactctctgagtcatgtctcatcctaactttgccttattagcaaatctgttgttttcagcagaatgggttaacagactcgtagccctctgcagatccgcaaaggagacagtctctcttagatgttacctcctaagttctctggcctgtccctggtgtgtgctcactgactgttctgaggttattcctcagcctatctgcaatggaattccttcaacacaagcagtgatgagagctggcagccttaacctgtgcacagtatctttgccatacattttgataagaagcatgtctccttggagatcttgataaggtaaatattatcttgaactcatggcctgagtatagctgcctgattattagggattgcaggcatgagccactgtgcccagctatgaggtaaatattatcaagaacacttcttcacttagaaatattaaaaattattaggtgtctgcatgttctcataagtgggagttgaacaatgagaacacatggacaccgggagaagagcatcacacacggggggcctgttagggggtcaggagctaggggagggatagcattaggggaaatacctaatgtagatgacgggttgatgggtgcaacaaaccaccatggcatgtgtagacctgtataacaaacctgcacattctgcacatgtatcccagaacttaaagtataataaaaaaaaaattattaggtgtcaacgatataccaggccccatgtaaggtactggtggtgtgttacatacagatacaggagccagtcatttctgtttgtcttttttttttttttttcagagatggagtctcgctttgttgcccaggctggagtgcagtggcacaatctgggctcactgccagctctacctacctgattcatgccattctcctgcctcagcctcctgagtaactgggactacaggtgcctgccactatgcctggctaatttttttgtatttttagtagagacagggtttcaccatgttagccaggatggtctcgatctcctgaccttgtgatctgcccgccttggcctcccatagcgctgggattacaggcgtgagccaccgcgcctggcctctgtttgtcttttataatctttccatcttctcacctatcctccctcacctttctgaatgggattgcaatgatttatgacaagcacacacaacaaacaaatggagactgagaaactcagtcatgaccaaaggaggcattaataagagtacggagtcaagaaaaaacttttggcccagcgtggtggctcacacctgtaattccagcactttgggaggccaaggtgggtggatcacttgagctcaggagttcaagaccagcctgggcactatggagaaaccctgtcactacaaaaatacaaaaattagccagatgtggtggtgcacacctgtagtcccagctactcgggaggctaaggtggggtgattgcttgagtccaacaggtgaggcttcagtgagtcaagatcgctccactgcactccggcttgagtgacagagggagatctttctcaaaaaaaaaaaaaaaaaaaaagcaaatagcaagaaagaaagaaaaaatctttcagaccgtaaaggcctatgtggttattatacttgtgctgacattaggctttgggtttcctggcaatcaaagcaagcagaaagacctattgctctttttcagaaaggaaagaggatttcagttcctcagggaaggcaaaactgtttgtttttagcactaagttctgaaaagcattttcaatgtggtgctttatataaggggcactgaacaagataatagacaacatgcttgacttcttccaaatagcaagcacatgaatggaatctatatgacgacttcttgtgttgtctttagataatagtgatataaccttaaaatgcatctcaatggatgcgattatgtggggacttggctctgacgaaacgaagctgcctagacaagatgaattttatccatagataaaattccaagaaccagtccaagaaaaagagttgaacaaatccagtttttccttgggaaacgttcatcttcactatcagcagtttcttagccatttgagtgcccctttctggctccaatacagttggcggtcttttgtttaattttggcatcttgctctcagctagctgttattataattctcatagcagtcataaatgccattggagccctaagagttaagagttttggacttgctgagttttgaaaagtttaaaattcctttaaaaaataatcgttgaactcttcagagttttttatatgctaatatatattgtgactctgtaagagagaaaaataatgttcagtatttcttcatcatatttgatcatggaaccccttagtcatgtatcagatacctgttgggaaatgctgttgaaagttattctttgttaatgacttttaatgtagacattacaagatcccttgcagggatattggcactttagtataggattaatgatggtcaacaaatgtttgaaattgaaagctatgaatttttagtaaagcatccttggtgccctggcaagtagatgaaatatatttgggcaggtggaactttctagaatcctcatgtcataccacgtatttataagaccagccctcacaatcttggtcatggcctaaaagtctttcttcatctataaaatcaagattgtattcttcagcttaatctttgaatatcaactgaataaaataatcaaaatactgttgagacatttgaaatgtaatcattttaaactaccacttaaaaagaatagagcataataataatctttgggcaaaatttataaagaatacgctagagaatggctttctttttttttttttgagacggagtctcgctctgtcgcccaggctggagtgcagtggcgtgatctcggctcactgcaacctccgcctcccgggttcaaaagcgattctcctgcctcagccttccgaatagctggaattacaggcacacggacgccaccacgcccggctaatttttttgtatttttagtagagacggggtttcactgtgttagccaggatggtctcaatctcctgaccttgtgatctgcctgcctcggcctcccaaagtgctgggattacaggcgtgagccaccgcgcctggccgataatggctttcaaaaatgcacgttactctcactatgacacaaaataatgtgaataaacattttaatagcaaaggcattttaaaacaaaacagttaattaggggcatcacgcatggtataattctttaaaggtagacattgcttaagaccttgagactggatagagtgaaaagatatctcatcttttacatcttagaaataaatatttgtaaccatctggagtctattttctggattaaagagaagagcaataatcacacaaatttatctttgaaatgtcacttctaacatttgctagttgaacaatactataccttcccccctccattacatggtcaaatatattctccctaaaaatataattttaacatcttgaaacaaaagcagtttctattctctaagctaaaacattagtcaccagagaatggaattctgtctgaagattaggtttctctatcatgctccagtgagactaaactgaacattcttaactcttctactcttctgtgcatttgcctgattattatgtttacctgcagggaattcttcccaacacatgatgaactcttattcatcctctaaaacccaacatgctttccttttccaagaacgcttatcttcctcccattttatccatttctcctgtatgctacctgctgcatatacctatttctattttttcatttatcatatggaaaaaattccataagaacattaaaatatgttcttagagtatgagttcaagggaggcatgaactacctctaatttgtttctgtcttttggggttaaagtatacactacaatacagatctgcacaaaatatgctgcctcttttatttgctatagttgattgcatctagctctgcataccccagttctgctgccggtggaagcatgaacgtggtagaaaacacttaccttgtctgtgagaggtaacagccttttctggtttaacaaacattttcttctgattggtttaacatttgtgattaattagcctttagatgggtggtagaataaaatattatttcaaagttcaaacttcctatcaagattgtctcctcacttctcacaagctctctcttctcctctttcccccaagatggcatgtttgttccaagagaagattggattgtttaattcagtgtgcaggagtcttctggtgtggggctgccttctcggcactgaggaatgattaacctgttcagtgcctggttcccttgggttggtgttcactaaggcatagataatcccaccaatctatctgggcttcttgctgggaccacctcttgatgtgatagtcctttcagtttgggttttctagggtcctgtgttttatggtctcattctcccagtaccagctccttcaaatttctcaacatcaagtctctcaagttcctcatcttgggtcatgagaactccaagatctcctacataccaaatgttgctcgtggggaatatgctgctcactactgtctgtttgtgtctaatctttcacacccacttcatgatggattcagtggagaaagggggaacaaccctggacattttgatcctctctcaaataatctagagtctctatcaaggtctctatctatctctgtcatttttgtttttctttattggaacttgagtttgggaaaccaagttccttctcaaagacccaggctatattctcatcctagtgaaattccttccagatatttctttcttttttactgaattagatgaatgtcatttacattgaatccttactctatcctagagcttttagtaaaactctatgattcaagtcaagtcatctaggtttggctcctgacatgagaatgaagcttttatagtttagagaccacctttctttatcacaataggctggcttgcaagactaatgcttcactgtggactcaagagtttctttgggtttttttggtagtcaaaagctgaatattagatatatccttctttttttgcattcctactttcatgtgtaaattcacacagctggcaagaggaaggttgatattttttatcaccagcaccttaatgttgacttgggtttttctcatttgtcaaacctactccttttctgcctctccacagactttgtggttctgctatatttggccctatgtgattatgctgtattgacccagttgcccctaatcatgctgtctgtgctcagtacctgcagaaaagataagatatttctttttcctcttttcttcagagctaaacaacagtttagagcttccttgcagataggtgggactctatgtctaagttctggccagggaatatgtgtggaaatgacacaccctacttccaaggctgccttctaacacttcttttgcagtcctccataaacttttttatagtttgtcagttggccagagggagaggattcactgaaggaagggccctgaggtcctaggggatgacaggtctacccaatcaactttccgggtctattattcactgacctctaattaaaatttaagatctcttttaattgtgaatatagtcttaatttgaagagtatttccagtatctcttactttgtcacttatagaattatagatatttttatattgctttacagatatctcaaaatattaattacactcatttctagtttgacattgaactagttattattagacttgccactgaatcttgttatttaatatactaaaaacaagtacataattagcttatttgaagtttaaaagatatatttagggctggccacaatggcttacacctgtaatcccagcattttgggaggctgagggaggaggattgcttgagaccaggagtttgagactagcctgggtaacatagtgagacacagtctttacaaaaaatttaaaacctagctgggcgtggtggcatgtgcctgtagtcttagctactcgggaggctgaggcaggaggatcacttgaacccaagagttagaggctgtggagagcaatgattatgctactgtgccacagaacaagaccttgtctcttaaaaaaagtatatataaaactgtatttaaatatacttgctttcattttcatcttatgtattttatctgtgttttttttcgcttgatttttggccctctgtggtgtctctcaccatatctggtaatttttgattaagtgatggatattaccatggtatttttggttaaatgcagaaggaaagccatttaagaaagtcactgggccaggatgtgtatcttaaatatattatactgttttacccccttactcttatcaatgtttctcaatttggctttattaaaaggattaaaccctagagaagatgaaatcattgtgtgaccattttccataggtggtctttagctggtatcattttagatgcacagggacacagtcaattcattatacctatagtagttgcctcatggcattgagtttgattctctctcagaaccctggttgagaaaggctgctctggatgacaggaaaattttaagagacagggcagcttcaattcatctgatccctgcaaaggagtgaccagcaagaaaattatggtcctaagacagtttaggggaatcagcaaaaatggagtagattttgccattcttatttgtggaaagagggcattcagttagcctctgttgggctatgaagcctctagaaaacggtggtctgatcagctcagagtgttgatctagaattactgtaaaagcaaaaattaaagaaagataatgtgctttcagctgtaggcactttgataaccttgagactgtttgggattgatgccttcaagaaatattagggagatattgtcagacttttgcataataatttctattattagttcacagtaaaaactgctatcaaggttggccaatgggattgcttacacaccattgcctaatccttgggggaagtaaatgaacgtgacattcttctttgtacctcttccattaaaacgctatctgtgaaagaatagaatctgatgggtaatgcgcagaaactaaagcagtgaataatactcattactctcagagactattcagcttggcattatttgcttttcctcttctgatgaaaatctctaaaaatttttcagaagctatgaatataaaaattataacctaaggattcccagcaggttgaattatttgctgaaacacttacgaacagcaggtgtttagagaatatgtggcatcaaaagccattttctctcagccaaagcattcttttcacatggaggcataaaatgctatcaagattcagatttaaaaatgctgaggcatctgttattttttctctcccatctctgtatttgagtttttttttcatttttaggttattttaggcattttatcttttgtatcttttggtagtaaacaaaatattatttatttattattttttctgtaattctttggacttaatcacttgtagacaaattaaacatattcattatacaatttttagtcagtagttctctgaatactcccaatctgaggttaataggaattataggcattatcatttaatttagcactaaattataggattttgtcattttttactattatttgttgtttatcttatttcttccctaaataatttttttaatgtgtatatatgggtacgatggttagtttcatgtgtcactttgactgggtacaagtgccctgacattcagctaaacattattctgggtgtgtctttgcaggtgtttctgggtgagattaacctgattggtaaagtgagtcaagcagatggccctctctaatgtaggtgtgactcaaccaatcagttgaaaacctgaacacaacaaaaggctgagtaagagggaagtcctcctgcctgactgctttgagctgaaacattggctctccccacgtcttgagcctgccagccttcagactggaaccagcactattgactctcctgggtctccagcttactgactgaagaacttgggaacttactgactgaagcctccataatgaaatgagtcaatttctgagagagagagtgtgagagggagactttcatcctattggttctgtttttctgcagaactctgactaatccagtggatcatgtctttgatattaattttgtatatccatagcacatagtagtacatcacgagtatgttagaaacttaaaatagacgtttagaagcagagtgttccttgatcaaatgattcatgaaacctaaagtcagttactctgacataaaaattgactacacatttgctaaatccttgagtgcaggtactgttgcacttgttgggtttgatataggtggaaataaaggcagtgagaaatgcagtattgatcttgattaggtggtatgctgagtcactatatttgaatgaggaattgtaattatagcacataatacagcatgattttcataaaaaaaggtattatttaaatgacaggttaaactcatttacctttgtcaaaagcccatgtatatcttctgaaaattcataatattgtaagtgacagaagaagggttctatttatcaatgctaccataagatttgtaaaccagttaaagcatgtcatctttcctgcagcgattagtgcttttgatccaagtcagggcatgcatttagagttgtttttcaaattgtggtgatgaatatcttgtctgatttcacctataacccttgaaatggatatgcaggaagactaatcaagataaaagttttaatgcgttgttataaaacagagtgaaattatgactggttcatgctcaattttaactccacagccttagcctcattgggttgtgtagtaaccaaattaatggattaaagttagaaaatgtgccaaaccataaaccagagataagtaagcagaaaactgcactgtcatgaatggacatcgttctagtcacttctgagtgtgatggcatgagtattctcacatgaaagactattgtaaactcttacatttgttaaaaccaaacacttacagtctttacatgaacattataaacacaatttataaaaatatataatgttgcttttctcttgagatgtttcagctgagaaatctgagaaggtagaaacattgaactgcaaaatgcaactatcctctaaaatacctggtagtctagatttgctaccgatgtaatttttatacacatttcagaaagtaattttttccccaatactttgctggattgcccataggaatataaaaaaaaacacacatgctaatgttgcccacctgatattgagcagcacgatagagttagactcctgagctgcaacttctgggtcaaaagttgatgctatttcagggtagtaagcacagcatccctgttgccaggaggaaatgtattttcagctctgctctcattaggtggttttttgtcctcttcaaatatgaggaaaataaaatcctcttcatcacctcaacacagtggggactcaaagtgcatactccccaagggacacagagggctcagaatagagacaaatggggatgacattttgcaggtatattggagaacagtgaagacaaccactttagcagagtaacttttttttttttttttgagatggagtcttgctctgtcacccaggctggagtacagcagtgtgatctcagctcactgcaacctctgtctcctgggttcaagcgagacagccacctgagtagctggaattaaaggaccgcttaagttttgcatttttattagagacagggtttcgccatgttggacaggctggtctcgaactcctggcctcaagtgatccactggcctcggcctcccaaagtgctgggattacaggcgtgagccactgcgcccagcccagagtaactattaagagtggatattaaatggaacattgcacaagctcatgagcagatagtaagaatgccaactctgctagaaggtagtgacctgtaaaacctgtaaaaccatgaacagtgtgtggctttcaacagaagagatgccacagttggataaagatagagacagagaaattgtatctggattaaactgaaatagtgatgattttctgaatcatccttgattaaggattttcaccaaagacttattgaggaatactgtaaattaatatgataatttatctgcatgtatgccatttattgtttgtattctgtatataattatgattcattaactatatagtaaaatgtattaggtggatgcaaaagtaattgcggtttttgccatgactttcaatggcaaaaaccccaattacttttgcaccaacctatatgtaattttcattttccagtgcagatccattcggtctaaattaatctttttatcgtcacaaagttcttgagtttaagaatatttcacatgttgttgtaggtgactggactgggaagacactacctgaaaacagcagtctacatctgggcccagaagatccaaatctggaaatcagcccattgtctagaatgctacctttgccatactcgtttcagtctaggatactagacatatccatttttttttagagatcatcaggatttttgtaagagggcttgtgggggcaggggtggggtgtgatggggaggtgaacgggatgacaaagaatgcctttagaacttcattcaaaacactgtgctctatcacttactaagcatgactagtctttgtttgtgagagtatgcggaggagaattcagacatttatgattcccaactaagaccatgaatttgaaggaggcatgcttcctatccaacttcagaaatggaagcaaatcaagtaacaaatatttttttatccctttttatgggcccatcactgagctaactgcaaggtatactaaagagagactaactgtactcattacccttaaataattactgtaattacataaaaatacaaaagaaagaattgtcacagtctaaaacatttcatattagctagagaggcaataggagacaaattgtaaaaaattaactggttctggaacaaataggttttatagaagaaacatacttagtgacgttccttgacggagtagaagggcggggaggggaacaggtaggagacaggagaagcaagtccacagcactaacaaacccattcctggacttgtgcacatccttgagcttcagcccagcttttgcaggcagcagtgaccctgtatttcaattgttaatgccatgatacccctatatagaagaaattccatgactgctttcttaaaactgtttttgatattcagttccttcctaatttcattttagtttatcctcttggctatttgtcctccttgagaagaaagagtccgagagagagagacatggtctttggtatcaagatttgcatgtataattttctgagctagcttttctcaggaggagttattccttctgtctgtaagtgtccccaaatctttatgaaataacatactaattgtggccaagatgctagtgctcacgagcacctgtattctcttctttatcctgagcccccaggtagaccacactttctaggctcccttgcagattggtgtagctatgtgagagttctcgtaaatggcaagcagaaatgatgggaccattttcagactgacacacagagaacctcccacatgcaattctctaagctcttggctgattagagaggactctgggacaccaaaagagaatggagcctctggtgggaaagaccctgggcccctaaactgtgggtataagacagagccttcccttcctcccagtgcctcagattggactgtgatgtgatgtgagctacaaataacaatgattgcattagctgaatctccagttggttgctcattgattcatttaacgtatattattggaccacttctcatgttcaataccataatcctattgattttccaaagcaatgtcactatcaatttaaagcacatgaataaatttattataatagagcatagccattttggacaaatgtttaaaaaactttttatttagaagaatttcaaggtaacacttgtgagaacagcacaaagaacacttgtatgctcttcacccacattcacctacattttgttccatcggcttcatctcttgttctttcttcacgtatacacatatttttcatatttttctgaacctgatcactgtataaaaacaaggacactcacctacacaacagcagtacagttgtcaaactaaaggaaatttctcacatctattcaatcgactgtgtgtattccagtttatgaattgaccccaacctgtccttcataacatttttttctcacttatagagtagcccagtctaggagcatgcactgattttaatggttgtatctttttagtctcccttaatctttgtctttacctttaatttctgtcttttgtgacattgacattttaaaagaatacagtcctatctttctaatagaatgtttttcattttggctttgtctcatttgtcagcattggagttgggatatggattctttttaaaaatctttttattgaagtacaataagcaaacattttgaaccaaaactttgatagctcattgaacaagggtgagggattgaggtatccaattgtagttgtttcattgctaggttatgaggtagatgccatttcttcttcttttaaaaaaattttaaaaaccagaacatttattgcgtgactaatcattgaaattcttaagatgaactggatgctgcaacagttgtctttctggatttagctgttgttccttcacggaatctatggctgaatctgcagtacccaatttttaggtgcctcacttcaccagtcccagtggtattttgtcttttagacttgacactcgagttatacttcctcttgcacttggcagagtagccacatttgccacaggtcacttctgaaggtggtaggccttagacccacagcagggacacagtatgtgcatcttattgtggggctttccaaactatgacattccctttgtcatctcgcttctgtggctaagaccaaagagcagtagatgcaatttcttgttttctttttaatttttccataagttattgggatgcaggtggtgtttggttatatgagtaagttctttagtgagattttgatgcacccattacctgagtagtatacactgcacccaattcatggtcttttatccctcatccccttcccactctttccccctgagtccccaaagtccatcgtgtcattcttatgcctttggatcgtcaaaacttagctcccacatatcagtgagaacatacaatgtttggttttccattcccgagttacttcacttagaataatagtactcgatctcatccaggtctctgcaaatgccattaattcattcctttttatggctgagtagtattccactgtataaatataccaaagtttctttatccgctcgttgattgataggcatttgggttggttccatgattttgcagttgcaaattgtgctgctataaatatgcatgtggaagtatcttttttgtataatgacttattttcctcagggtagatatccagtagtacgattgctggatcaaatggtagttctacttttagttctttaaggaatctccacactattttccatagtggctgtggtatactttacattcccacttgcagtgtagaagttccctgttcaccacatccatgccaacatctactgtttttgtttttgttttttttaatggccattcttgctggagtaaggtggtatcccattgtggttttgatttgcgtttctctgatcattagtgatattgagcattttttcatatatttgttggccattcgatatcttcttcttttttttttttgagacagagtcttgctctgtcgcccaggctggagtgcagtggcgcaatctcggctcactgtaagcaacacctgccgggttcacaccattctcctgtctcagcctcctgagtacctgggactacaggtgcccgccaccacgcccggctaaggttttgtatttttagtagagatggggttttactgtgttagccaggatgggctcgatctcctgacctcatgatctgcctgcctcagtctctcaaagtgctaggattacaggcatgagccaccacgcccagcctgtatatcttcttttgagaattgtctattcatgtccttagcccactttttgatgggactgtttgttttttttcttactgatttgtttgagtttgttgtagattctgcgtattagtcctttgtcagatgtatagattgtgaagatcttctcccactctgtgggttgtctgtgtactctgttgactgttccttttgctgtgcaaaagctctttagtttaattaagttccaactatttatctttgtttttattgcatttacttttgggttcttggtcatgaaatccttgcctaagccaatgtctagaagggttttccaatgttatcttgtagaatttttaccatttcatgttttagatttaagtccttaatccatcttgagttgaggatccagtttcattctcctacacatggctagccaattattccagcaccatttgttgaaaagggtgtcctttccccactttatgtttttgtttgctttgtggaaggtcagttggctgtgtttgagtttatttctgggttctctattctgttccattggtctatgtgcctatttttataccagtactatgctgtttcggtgactatgggcttgtagtatagtttgaaatcaggtagtgtgatgcctccagatttgttctttttgcctagtgttgctttggctatgagggccttttttggttccatatgaattttagaattgtttttttctaattctgtgaagaatgatggtggtattttgatgaggattgtgttgaatttgtaaactgcttctggcagtatggtcattttcacaatattgattctatccatctatgagcatgggatatatttccatttgtttgcattgtctatgatttctttcagcagtgttttgaatttttccttgtagaggtctttcacctcattggttaggtagattcccaagtattttttttttttcagctattgtaaaaggggttgaattcttcatttgattctccacttggtttgtgttgctgtatagaagagctactgatttgtgtatgttaattttgtattcagaaactttgctgaattattttatcagtcctaggaactttctggaggagtcttaataatgttttctaggtaaatgatcatactgtcagcaaacagtgacagtttgacttcctctttactgatttggatgccctttatttctttctcttgtctgattgctctggctaggatttccagtactgtgttgaagaggagtggtgagtgagagtggacatccttgtcttgttccagttctcggagggaatcctttcaacttttccccattcagtactatgttggctgtgggtttgtcatagatggcttttattacatttaggtatgatgtcccttgtatgctgattttgctgagagttttaatcataaagtgatgctggattttgtacaatgctttttctgcatctattgagatgagtatgtgatttttgtttttaattttgtttgtgtggcgtatcacatttattgacttgcgtatgttaaaccattcctgtttctctggtatgaaacccacttgatcatggtggattatctttctgacatgttgttgggttcagttagctagtatttagttaaggattttaacatctaagttcatcaaggatattggtctgtagttttctttttggttatgtcctttcctggttttggtattagggttatgctggcttcatagaatgaatttgggtgggttccttctttctttatcttatggaatagtgtcaataggactggaaccaactcttctttggtagaattctgctgtgaatccgtctggtcctggacttttttgtgttggtaattttttaattaccatttcagtctcactgcttgttattggtctgttcagggtatctaattcttcctgatttaagctagggggttgtgttttttttaggattatccatctcttctaggtttgctagtttatgtgtgtaaggatgttcatagtagccttgaataatcttttgtatttctgtggtgtctgttgtaatatctcctgttttgtttcttaatgaggttatttggattttctttcttcttttcttgggttaatcttgttaatggtctatcaattttatttatcttttcaaggaagcagctttttgtttcatttatcttttgatattctttctgtttgtttcaatttcagttagctctgctctgatcttggttgtttccttttctgctgggtttgggtttggtttgttcttgtttctcttattccttgaggtatggccttagagtgtcagtttgtactctttctttttgatgtaggcatgtaggcctattaactttcctcttagcactgcctttgccatatcccagaggttttgataggttgtatcattattgttgttcagtttgaagaattttttaatttccatttggattttgtttttgacccaaagttcattcaggagcaggttatttaatttccatgtatttgcatggtttcaaaagttccttttggagatgatttccaattttattacactgtggtctgagagtgattgatataatttcaagtttcttaattttactgaggctcctttttcggcttatcatacagtctatcttggagaaagttccatgcgctattgaatagaatgtgtattctgcagttgttggatgaaatgttctgtatatatctgttaagtccatttgttccaagatatagtttaaatccattgtttctttgttgactttctggcttgatgccctgtctagtgctgtcactggagtattgatgtccccactattattgtgttgctttatatctcatttcctaggtctattagtaattgttttataaatttgggagctccagtgttaggtgcatatatgtttaggcttgtgatattttcctgttggacaaggccttttaccattatataatgtccctctttgtcacttttaactgctgttgctttaaagtttgttttgtctgatataagaatagctacccctacttgcttttgttgttcttttgcatgaaatgcctttttcacctctttaatttaagtttatgtgagtccttatgtgtcaggtgagtctctggaaggcagcagatggctggtgagttcttatccattctgcagttctgtatcttttaagtggagcacttaggccatttacactcaatgttagtattgagatgtgaggtaccattgctttcatcttgctatttgttgcctttgtaccttgttttttgttttcacttttccacttgtatttttgttttataggtcctgtgtgatttatgctttaaagaggttctatttaatgtgtttccaggattcatttcaagatttagagctacttttagcagttcttgtagtggtggcttggaagtggcaaattctctcagcatttgtttgtttgaaaaagactgtatctttccttcatatatgatgcttagttttgctggatacaagattcttggctgataattgttttgtttgaggaggctgaagatagggccccaatcccttctagcttttagggtttctgctgagaaatctgctgttaatctgataggttttcctttataggttacctggtgcttctgtctcacagctcttaagattctttcctttgtcttaactttagataacccgatgacaatgggcctaggtggtgatctttttgtgatgaagttcccaagtgttctttgtgcttcttgtatttcgatgtctagatctctagcaaggctggggaagttttccctgattattctgcaaaatatgttttctaaacttttagatttcttgtcttccttaggaacagcaactattcttaggtttagttgtttaacataatcccaaacttcctggaggctttgttcatattttcttattctttgttcgttggatttggttaattcaaagaccttattttcgagctctgaagttcagagcattttgcatttctataagtgtatccaatgttttctgaattttttattgttttttctttatgctatctagttccttggatatgtctcccttcacttcgttcactcgcgtctgtgtgaagagaccaccaaacaggctttgtgtgagcaacaaggctgtttattgcacctgggtgcaggcaggctgagtctgaaaagagagtcagcgaagggagataggggtagggccattttataagatttgggtagataaaggaaaattacagtcaaaggggggttgttctctggcgggcaggagtgggggtcacaaggtgctcagtgggggagcttttgagtcagatgagccaggagaaggaatttcacaagataatgccatcagttaaggcaggaacaggccattttcacttcttttgtggtggaatgtcatcagttaaggcaggaaccggccatctggatgtgtacgtgcaggtcaaaggggatatgatggcttagcttgggctcagaggcctgacaacttcttttatcagtttttggatttccttgcattggtctttccctttctctggtgcctccctgattagcttaataactgatctcctgaattctttttcatgtaaatcagggatttcttcttggttgggatccattgctggtaaactaatgtgattttttaggggtgttaaagagccttgttttgtcatattaccagagttgattttctggtttcttctcttttgggtagcctctgtcagagggaagatctagggctgaaggctgttgttcagattcttttgtcccacaaggtgttccctcgatgtagtactctccgccttttcctatgcatgtggcttcctgtgagccaatctgcaatgattgctgtctttcttttgtgtctagccagccagtgagtctacagggctccagtctggtacagggggttgtctgcacagagtcctgcgatgtgaactgtttatgggtctctcagccgtggatcccagcacctgtttccagtggaggtggcaggggtgtgaaatggactctgtgagggttcttagccttggtggtttaatggtctatttttgtgctggttggcctcctgccaggaggtggcgctttccagagagcatcagctgtggtagtgtggagaggaaccggcagtgggtgcggccccagaactcccaagattatatctcctttgtcttctgctaccagggtgggtagggaagggccatcaggttggggtggggctagggggtgtctgagttcagactctctttgtgtgggtcttgctgcagctgctgtgggggatgggcatgacattcccaagtcaatggggttgtgtacctaggaggattatggctgcctctgctgagtcatgcaggttgtcagggaagtcggggaaagctggcagtcacaggcctcacccacctcccatgcaaactgaagggtcagtctcactcccaccattgccccccaaacagccttgagtctgtttccaggtggtgggtaagctgagcttgagaacttgccccaggctacccacctcccagctgggaacgaaaagggcttggttcttcccccacctgtgggagtgtgcgcacgggattcatgccctccccccagttctggccaggaggcttctcacatggttccaattgttaaaaaattcagctggagatttccttctccctgtggtgtttttcccccgctcctctggctgccttcctgatggatctctgtggtcccaggcaggaatggcctgcttggggacccagcgagctcccaaggcctttcctgctgcttcctctatccctgtgttttgcttggctctctaaattgactcagctccaggtaaggttggaaacttctcccacaaacagaccttcagtttctccagtgggggtgtgtgtttgggagaggagggtctccctttcccacttttgcagttggggcactcacagtatttgaggcatctcccaggtcctgcaggagcagtcggcttccttcagaggggctgtgggtcctctcggtatttctggtttgttcttgtagtcgatctggggctaaaattcacagtgccagcctcagcatgctgctctgtcggagtcaaagctacagcctagtcctgcctcccttctgccatgagctcctcattttctcagtagatgcaatttcgaacagcaataacaacattgtagttttttacaacaagcataaatgattgtacttttgggcagcggaattttatgtaaaatgaggaaatgggtggtttccagcctgcttgcctcttggtggtgactcgcagctttcagcatttagaatctcttgctactcattgctttcaggatgccacagattctcttttgtctggagaaatgtatgtgataacctggcactcacgccttggtgtctaggtaggtatattaacctaccaaggatgtatgcattttagagacgttatctggaaagatcaattcatgactcagagcatgtttttccaagtgcggcatttctaggatacagcatctggacagggaaaatgtttctgagcagtggagtagttaatttttttttgttttttttttttgtttttttgttttgttttgttttgttttttttttgaggcggagtctcgctctgtctcccaggctggagcgcagtggcgcgatctcggctcactgcaagctccgcctcccgggttcacgccattctcctgcctcagcctccggagtagctgggactacaggcgcccgccaccacgcccggctaattttttgtatttttagtagagacggggtttcaccgtgtcagccgggatggtctcaatctcctgacctcgtgatccgcccgcctcggcctcccaaagtgctgggattaaaggcgtgagccaccgcgcccagcctggagtgtttaattttatgtgtcaacttgtctgggctgtagtactcagttacgtaaccaaacaccaatccaggtgtcactgtgaaggtatttcgtagatgcaattaacatctacggtcggttgattttaagtaaaagatactaactttcataatgtgggtgggcctcatcccaacagatgaagtccttcagagcaaaaaacaggtttcactgaaaagaaaatctgcctgaagaccatagcatcctctcctgactgcatttccagcctgcttgtctgtctctacaagtttcagacttgccagcccgcataatttcatgagccaattccttagaataaatcttttaatgtacacactcacacacacacatccaaatgcttctatgtctctggagaatcctgactgatatataaacaactgcacaggcaggcagttgtttttgtattcctcgaatcatgcctcactgtggtcattactagcacaatgctttgaatatgagaagtgtttaaataatatatattaaacggatcaatgagtaactaactggagattaacctaatatgaaagttagtattgaggctttaaagtaaaaaataaattttagccttgtgatcatatttctccataatattgaaagcctttattgggactcgaatggtttcctgtttatcatcaagtaatgatggaggtttgctcttaattctgtattgagtaaatacatgtcccatataaaattttttgctgccctctggtggatatagttcaataaataaacattatacaattatatatcaaattccatatattaagcagtttctcatttgtgtatgttcccaaagttgctttctcagtttagaaattggaatgcatttttcacatcagaagagaggttagtatctcagatctgcttgtaaatccctattataataaatggtacttaaaatatggcacaaaaaatagtgtagagcctaacaagtaggtagttgcaatgatttcatgaggaaatccattgaaagtgatcacttgggaacacagttagccatcttccctgctgtggccttgattactgaggaaggcgaagtggaatttcctggatcccatccctgggggtgcttctatggcctgccatggggtgtgtgtattgggaggtgggggtgggaggatggtgaaggacagaatcgaaagctttccaggaatggggtgaggcttgggggtgtagtgaaagggaatgaggcagagcatagcccggaggaacagaagtagctgagttctaaagaaatgaaagatctggaaataaaatacatatgggactgaagggacaagagtgacactaaagacaggcagagaggagtgaagaacagtggtaaagagtgtcctgtgcccgctcacaagagccaattgttaaattttcaagaattttgtgagccacttattaaacacagacattattaaaaactaagtcaaggccggccaaagtgcctcacacctgtaatcccagagctttggaaggccaaagtgggatgattgcctgaggtcaggagtttgagaccagcctggacaacatagtgaggcccccgtctctacaaaaaataaaacgaaaaataaattagctgggcatggtagtgcacgcctgcagtctcagctgcttgggaagctgaggtgggaggatcacgtgagcccaggagttcaggctgcagtgagctatgattgcaccactacactccagcctgggcaaaagagcaaggccctgtctcgaaaaaattagtcgtataaacttacaatgaagtaaactgtctttaaaactaaactaatatgtactcaagactcaccgcttcctaagtattttactatttagtaaagtcaccttttgagatgatttacgttttgcattcatatggtgggaatattccacaatgatgtgttgtccagcatctctccccagctctgcattccgagatatcagtaacttcttgttggttacagtgtgaatacttttgccaagaaaactgaaaaatgctacaaatcaaatcagctctcctctatccccaagagctgaatgttaaacagttgccagcattccactgggtaaggacatctcttcagtaacaaaagaaggttttctttcttttttaaaaaatagtttcactacctgtgctagattggtgttctagttcatttattcattaaataaaaaatattattttttgattctctacttgttaggagataattttccatgggtttcttatgtttctgcataccttataagaaagacacagattaccctttgtcccagaaaatcttttcagtgatgttcatacagtgaatggccttggaagctagggattgggtctccctttggagcaaagggcagacatgcttgctgcccattataaaatttttgcatcccctaaactcagcattcctctcctgtatcacaacccactatgtattcaggtatctttcggttcttttgtgtcaccctgtagacttgggcctcgagatactgtccccaaaatgccaaaatcctggctgttgctattgttgtgattaataagctgttcttcttctctgaccctgagtctcctgtcttctactggcatcaatgaaactgtagcaggcaaacttattggcttgtgagtagggcaaaattcagtcccttcccagttctttacagtattatgtgtcaggcagtgagcaaggaactgaaatgcaggggtgagtacggcaaaaagatccttgtggagctcaatatgtcttgtaggattataaacaaaaagcattaaaaataaatgatgaatatttaaaatttatattaggataagaattaagaaagagtagaacagtggtgcgatagagtaatggagctgtctagagggaaatctgcatgagttgttggggaaggtctctctggtaggtggttaagccaggagaaagaagttacggctgaagagtgaagagagggagtatgtaaaaataccataaaggaggccagccaggtgcgaaggctctcgcctgtaatcccagcactttgggaggccaaaggcaggaggatggcttgagcccaggtgttacagaccagcctgggtaacatagtgagaccctctctctacaaaaaaaaaaaggagtcatgaagtagcattttttggttgattaataaaggggatttttttttatgggaaaagatatgttttcttccattttcctcttttcattaaggtaaatacgtgggaggggaggtttccagacagtgtgatagaaatggcaggagattgcacttttcctgcattggaatcacatgaaattccaaatattgtataaagacttgtgatttgaggaaatccctggaaataacacttgggggctgaataagagtagtattagtacagacggtggaaggcagcgaggaggacagaaaacgtggctgtagtgagaggaatgaaatgactgtctttgtaccctccctgagcagtgctcccaaggtgagagctgatgaactggggatggattgcctggagttttaatgttttctgtcaacgttaggtagcaaaatccacggagtatgattccaacaaacaattgagagttagagtgaagtgaagctacctaaaggacagagaaaaagggtttggaaactcagttcctgactcttgattgctctatgacctctctgatatctttattaggtatggcactttcttataagaggttgctgtaactaccctactgaagatctgagatgggaaagcaaaggcagaacagcaaactataaaagtccccttcttacatcttccaccaatgtggcgtttgaatacttctgtgaatttttagaaatatgggttagaagttacactcaaggcaatttaaaagtaatattttttacacttcctagaagttacagtctagtcaatttacaaataatattttttaggtcgggtacggtggctcatgcccgtaatcccagcactctgggaggccgaggtgggcagatcacttgagtcaggagttcgagaccagcctggccaacacggtgaaaccttgtctctagtaaaatacaaaaaaaagaaaaaaaaagaaaaaaaatacatatatgtatatatattacttgggcgtggtggcaggtgcctgtaatcccagctaatccggaggctgaggcaggagaattgcttgaacctgggagggagaggttgcagtgagctgagattgtgccactgcactccagcctgggtgacacagcgagactctgtctcaaaaaaaaaaaattttttttttatacttcaatatctttattgacataaatggatattgtataacgtctgttctagatgcaatctgtaagttggttttatttgcttttttcttttagtaccaggtattagataacctaaaggtatgcacaaagttttgtccttggataataaagtgctggctgctgggtttatcggttttcactgtaaaatgccaaaaaaaaaaacaatctagaaaacatccaaattattttactgtgaaattttgttaaaatgaatatattgctgtaatcacatacccttacattttaccaagcacttaacgtagtcctataagaatgcccaaaactagttgttgatatactggttttttttttgcagatgaaaaagcaggctcagagtggtggcgtgagctgcttcaagtcacatagtaactagccaatgtcttaaatgagcccttggagcatctacacggtgttctgtgatcaaaggcctcagggagtttttacagatttcctttctgttgcttccctttttgtttatgagactatccttgctgcacgcctccgttctcagtgtcagtttttttgctggcccaggcttcttctattcatagccagaatggaagtcccagcaccagttcctgccctgtgtgtaaagcagggtcgtttcttgtctgaataaaatttgctggtggttttgcatatcttaaagttttggaaaatgtatccaaagagaatgctcttttttttgagatcgggccatcagaaacactgatcccagcatcatttaatttaacatcctattggagagaagaataaaacacatccattcatattcaaggaaatcagacctaaatgtatctacttcttaaaaaaattcgaagatattgtctttaaaataataacccggctgggcacagtggctcatgcctctgatcccagcactttgggaggtcgaggtgggcggatcacgaggtcaggagatcgagcccatcctggctaacaccgtgaaatcctgtctctactaaaagtacaaaaaattagccgggcgtggtggcgggtgcctgtagtcccagctactcaggaggctgaggcaggagaatggcgtgaacccggcaggcggagcttgcagtgagccgagatggtgccactgcgctccagcctgggcgacagagcaagactccgtctgaaaacaaacaaacaaagaaaccaataaccctcaggaatattaaaaaccatctcaacttgctgaggaacctagaataagatatgtgtagggctgagaatatgagcgatgaaaaaaaatttcttgacatagtcaaatggtgaaaacacttatttatttatttttgctctattttttatttttatttttattattattatactttaagctttagggtacatgtgcacaatgtgcaggttagttatatatgtatgcatgtgccatgctggtgtgctgcacccattaactcatcatttagcattaggtatatctcctaatgctatccctccccccccacccgactgcacaacagtccccagagtgtgatgttccccttcctgtgtccatgtgttctcattgttcagttcccacctatgagtgagaacatgcggtgtttggtttttttgtccttgcgatagtttactgagaatgatgatttccaatttcatccatgtccctacaaaggacatgaactcatcattttttatggctgcataggattccatggtgtgtatgtgccacattttcttaatccagtctgtcattgttggacatttgggttggttccaagtctttgctattgtgaatagtgctgcagtaaacatacatgtgcgtgtgtctttatagcagcatgatttataatcctttgggcacatacccagtaatgggatggctgggtcaaatggtatttctagttctagatccctgaggaatcgccacacctgcttccacaatggttgaactagtttacagtcccaccaacagtgtaaaagtgttcctatttctccacatcctctccagcacctgtcgtttcctgattttttaatgattgccattctaactggtgtgagatggtatctcattgtggttttgatttgcatttctctgatggccagtgatgatgagcattttttcatgtgttttttggctgcataaatgtcttcttttgagaagtgtctgttcatatcctttgcccactttttgatggggttgtttgtttttttcttgtaaatttgtttgagttcattgtagattctggatactagccctttgtcagatgagcaggttgcgaaaattttctcccattttgtaggttgcctgttcactctgatggtagtttcttttgctgtgcagaagctctttagtttaattagatcccatttgtcaattttggcttttgttcccattgcttttgttgttttagacatgaagtccttgcccatgcctatgtcctgaatggtaatgcctaggttttcttctagggtttttatggttttaggtctaacgtttaagtctttaatccatcttgaattaatttttgtataaggtgtaaggaagggatccagtttcagctttctacatatggctagccagttttcccagcaccatttattaaatagggaatcctttccccattgcttgtttttctcaggtttgtcaaagatcagataggtgtagatatgtggcattatttctgagggctctgttctgttccattgatctatatctctgttatatataccatgctgttttggttactgtagccttgtatttgaagtcaggtagtgtgatgcctccagctttgttcttttggcttaggattgacttggcgacgtgggctcttttttggttccatatgaactttaaagtagttttttccaattctgtgaagaaagtcattggtagcttgatgaggatggcattgaatctataaattaccttgggcagtatggccattttcacgatattgattcttcctacccatgagcatggaatgttcttccatttgtttgtatcctcttttatttcattgagcagtggtttgtagttctccttgaagaggtccttcacatcccttgtaagttggattcctaggtattttattctctttgaagcaattgtgaaggggagttcactcatgatttggctctctgtttgtctgttattggtgtgtaagaatgcttgtgatttttgtacattgattttgtattctgagactttgctgaagttgcttatcagcttaaggagattttgggctgagacaagggggttttctagatatacaatcatgtcatctgcaaacagggacaatttgacttcctcttttcctaattgaataccctttatttccttctcctgcctaattgccctggccagaacttccaacactatgttgaataggagtggtgagagggggcgtccctgtcttgtgccagttttcaaagggaatgcttccagtttttgcccattcagtatgatattggctgtgggtttgtcatagatagctcttattattttgagatatgtcccatcaatacctaatttattgagatattttagcatgaagcgttattgaattttgtcaaaggccttttgtgcatctattgagataatcatgtggtttttgtctttggttctgtttatatgctggattacatttattgatttgtgtatattgaaccagccttgcatcccagggatgaagcccacttgatcatggtggataagcttttcgatgtgctgctggattcggaaaccacttattttaaaataaaacaatatgataagcattatattaaatcgacaattaatataatatgttaaaaaataattaaaagcattatttaaaatagaataataaactatttcctccataaggtcaattaggtattctgccttcattgccttaaggaagggacaatacagacaaatctgatcacaaaagttaaattcttggttaatctatttctacttctagaatttagcagtaaatgatagattttgaagatgagataaagagttgtttttcctgcttctgatttactgaacctaggaagaaagaaagtgagaaggtgaacaagaggctagatatggtgttactaaaaattggaggctgacacttgatttctctcctttgttgactgccactgccatcttaaaggaagacagcaacctcagatacgttggagtctcagataattaattgaagggaactatgctgctgtttgctgaacttaatttgtcccattgctagagccaattgttaagtttttaggagtttcgtgaacttgctagtatcacattggtaacttgaaatcagccatggtgagagttttaatctacagaaatgggcagatgctcagcactttgggaggccaaggtgggcagatcacaaggtcaggagatcgataccatcctggctaacacggtgaaaccccgtctctactaaaaatacaaaaaattagccgggcgtggtggcgggcgcctgtagtcccagctgctcgggaggctgaggcaggagaatggagtgaacccgagaggtggagcttgcagtgagccgagattgcgccactgcactccagcctgggcgacagagcaagactccgtctcaaaaaaaaaaaaaaaaaaaaaaaaggaaaagaaatgggcagatagatgctacaagcccgtcccccaccacatcctggagagctgttgttaaacacttaccagcaccccactggatctgtgcctcccttcccaggtggagcctggagaaatagacagactgctgaggacccagcgacttcttatataccacatcaagtgtaaaatttgcagtgtgatgcatccaggaggatgggcttctgtcatccttttagggttcctgcttgtctctttgtactctgaggaggagtagaacaatttctcatgtatctaagagcagcacagagtgggaaagtatctcagacaatattgataattgacctgaagcctcagagtggtatgggagagcagatcagtttttgcgagctccttgaaatgggcatagcagtgattcaatatgaccaagtttgaagattcctgaggttgaggccaaatgatgtgtcagcaacctgtgtggtttagggttaggatttggataaagcaagtgagtcacgaaccctgggtgcaacatttaatggtgtgccaaaaaactcagtattttatttattttgttagttttaaaaaattttatttttatttccgtagtttttggaatacatgtggttttggttacatggataagttctttagtggtgatttctgagactttagtgcatctgtcacccgagcagcctacactggacccactatgcagtgctttatcccttatccccctcccaaccagcccccaccccagtctccagggtctgttatatcactctttttttttttttttttttttttgagacggaggagtcttgctctgtcgcccaggctggagtgcagtggcgccatctcagctcactgcaagctccacctcctggcttcacaccattctcctgcctcagcctcccgagtagctgggactacaggcatccgccacctcgcccagctaattttttgtatttttagtagagacggggtttcaccgtgttagccaggatggtctcgatctcctgacctcgtgatccgcccacctcggcctcccaaagtgctgggattacaggcgtgagccaccgtgccctgcctgttatatcattcttatgcctttgtgttatcatatcttagctttcacttataagttagaatataccgtatttggttctccattcctgaaaactcaatattttaatgccatatttgaaatatcaaaattaagcaaaagtacattatgaataaaatattaatatattaagtaaagccagtatcgatatcagtgagtttttcttctgcctcaggctgtgatggactacaaggggtactgttactgatcctgcttcacttcttgttgatcctgcttcactcctctcatcctggtctaggggagggagtcggctggatcaggggtgggaggcagggtgccttgaatagcttgcaacttagttcctgaatgggagtttgaaatggacagacaatgtattgaatttcagaaaaataaagctgtaattcttgcacatgtgacttgtaggctcagatttgaacttcctgcacatgagtttggctgcaagttattcttgtatctataatgaaataatttataaacattgttttttatcttcatgtgggattaaatatttcgttacttgttggtaacagctgtagtcaggtatgacttatagaaatcatgttgccattttcttagatggtttcaaatctgtagggatatctgtatgtatgtatatatatctctgtctatatatattctgaacttcattacagtgtgccatcttttctagtgctaatattagagtcattggtatatagttctcaagatccttccagtgatttatcaaaaataacagaaaaatattttgaccaacaatttcaataaattcacccttgacttattttctaatatcttggttaatgtcagctttcatctcatctcctagtctctgccatttccaataaaaataaaacaaaaatagctgacattttatcagtctgactatgcaccagaaactttggaaattgcattacatgcattatcttatttactatgacagctctgtaagagatggacgattaaaatgtctatttacagatgaagaaactataccttaagatagtcacgggactggcaaatggcaaactcaaacccttgtctgcctggttccaaagcttgttcatatactcactgtgccaaaccaccaaatccaatgttcttatacctcaagatgaggtccactgatccccttaccccaagtggcaacggtgttttcctttttcttagagctagaatatcgtgtagcatctccagtttacaggggctgtattatctctttttattcctagaacataatgattgatgaagtattaagactatgtttccttatgaaaaataactgcgaaaataatgtcaacagatagtactggtgatggaattgaatagaaaatttagcacaagatggaaaatttataaaacaaatgacagaccatgttgatatttgtgaattggatcagtattgttttatttacaaatgacagaaaaccttctcaagcaagatcgtgggagctgggctggtggctttgtgagggtggactgggatctggatttggaatggaaggaagcactcacgatgtggggatgtgaaggccacctgagccaagaccagaacagggaatagggtaaaggttagggttttagggcaagagtgagactgcagaaagaaaacaagacagcggtacagtaatggaggtcagtccattcaggctgctgtaacaaaacaccagaaaccagggggtttacaaaagcttgcatttatttctcatggttctggagacgggagagttcaagatcaaggtgccagctgtgtttggtgagggcccgcttctttactgatggtatctcttcaccctcctctcacatggcagaagagtaatgggtctctctagggcctcttttataagggcactaatcccaaacatgggggcttcacttccatggtctaatcgcttctcaaatgcttgagtcaccagaaacaccaaggcatgattagaggtctggaactttcaccctaacactcaacctataggaagaggggctgaacttgagttcagtcaccaatggtcagtgatttaatcaatcatgcctacatagtgaaaccttcataacagaccctaaacaatggtattagaagaactttctggctggtgtacacattgaggtgctgggacggagactggcctggaggaagcatggaaactctgtgctcctcagccctctatacctcaccctatgcatagggcaaatagacgtatcacaatattacagatgtgcagagtggtttctgattccaggttggagcctgacttacacactgtgctgctcatctttgatcttcataggcctataatctaatactactttagtaatacatatatgggaccacaagaacacttagcacaaccattctctttaagtgccatattttggagagcttcaattccaaagcaaaagatgtctatcaaattttacagttaaaaaaaaaaagaatgaggttttggtaaaggcaggaagataaatcgagaatacacatgtgggaggggttgaaagtaggtgtaagacaagtggcctgcacattttggcgtgaggaggggaaggaactggtagagatggtgggtgggtcattgactgaatggcctagtggtggcatcttcaggtgaggcacatatatgaggaggagaggagagttcttcctaaggggcaagtaaagagaaggtgaataaaaggaaggctgctattcgagaatggtgcagtggagaggaaacaggaaaaaaaattgaggaagatttctcccatttaatgaagtacttcagtatgtctaattggaagtatacattattagtggaagtctttgaaatgaattcctcagcaaagcctaaggtagtttaagaatttaatctctgtttttcctctttcactcatggatatgcttatgtattattatcaagtggaccagttgattctctagttggttttgttgtgacataaaatgtctgtttaagtgatctttttacgtggtaaatatggtactttatagatttttgaaatctcaactttttctgtcctgatatttgccttcatcctttttccctttcctctcttcaagaagctgtgctgtttgtggtcatttcctatagaggaatgtggagcatgaaggtttggtgaaaacatatatgtttccattctttctcaggcttttcttttccagaatgctaagcctcaaagagaataaaaagccagagctgaggttttgaggaggttaaagcttttccaggcagagagaaaaattcagatgaatttgtgaaatttgtgagtaaagtgatctgtgccttgctccctaggaataacactggagagatgagaagatcccatctgcctctgtcgcctggatgaatcttgacttacccgctgtgctgcctgtctttgagcttataagcctataacctaacaatgcttcagtcattagagatatacattccggtatataggactattaagaacgcttaaccattctccttaagtgtcatatttggcaataaatgaccgcatggcatgtctaggtacctggtacaccttagacaatcatacagatgttctgtacccccagcatggtatgaatgtagagtgagtcttaatcgccagtagtctcccagaagcagcagagattgtgttggacctgaaggagccatgcagacagggatgaggcatgtctccttcagaggaggcaatgggtataccagtgtgtgtccccaggctcagattacacacagagccagatggtctccttctgatgcttggataccgcaaatagccccagaacttaaatgcaacctcagaggaaagtggcaagggagcccagattaaccgagattaagaaaaagaaccttatttttttccagtttatatccagattgtctccaagtcatttattacaaattcatctttttttcaactgattgaaaacaacatcacatgatatactaaaaattattttatatatttaggtctatatttgggctttcttttctatcccagtgaattatttatctatttttgaacaggcactgtattttcttaatgttgtagctttataatatattttatgacttgtagagctacttcctccttgttactgttttttttttagattttttaaaattatttttgctcatatttttatagaaactttaagattagcttcagtagttcaaattattgctagtatttttactagaatcaatttaaagttatgaattaatggaggtttccagctttatcatgttgatttttcctattcagaaacatggtatgctttttttattcgttcatacctatttttgttgttgttgttcattactagtgttacatagtttcttcacatacattttgcacatttcttattaggtttcctgtgtataagtcagagtcccagcaagaaaggtatagcaaatattccaatgggctaatggaggggagtttgatgaagggattattttcaaaggtgaggaaagggttaaggagactcaacaagggacagtgtaaaggctaattttaggtgtacacttgactgcattaagtaatatccagagagccggtaaagcattatttctgggtctatgagggcgattttggaaaagattgacatttgagccagcagactacgtaaggaagatccactctcactgaatgtgagcgagcaccatccaatcagctgagggcccagatagaacaaaaaggcagaagaaaatcagattcactctctctcttctggagctgaaacaactttcttttcctgccataggacatcaggaccccaggttctctggtcttgggactctgagacttgcaccaggaatcctgcccaggctctcaggcctttggactcagactgagctacttcactggctttcctggttctccagcttgaagatggcagatcgtgggacttctcagcctccataattgagtgagccaattccctggtaagtcccctctcacgtatttatatctatatccttatactatttgttctgtttctctgaaaaaccctgaagaacacagcagtaaaataacctggggctagcgaccacagagagtaacaagaaggtggaaggagtgtaccagactctggaggggacacttggaagagattcatgccctacccaaggtggggccatctgtagagggatgcagacaacccagggaaggacacaccctgacctcactcttctcttgccatctgattacctggcagtgccttctattggccaaacccaacagaagccagagaagaaaggtgaccattgatgtggttcacaaatgtctatctgctgggacacagagaagagtaaagagtagatctacaggaggtaaatgaatgatatttagcacactgcatgttttatctttttgttaacagtgtaaaaatgaagtcttctgttgtctctctctgatatgcgtgtgtgtgtgtgtatgtgtgtgtgtgtgtagttctgccgttcttgaagctaaactctaaaggaggtgatgaacaattagacaagtagttataataaatgtgctactatatgggaaataaaagatctcatgaaagttttagtaggtaaaccttgtgaagtctgtggagtcataaatggctcctgaaacaagacaggtttaaatagatatcctgaggataaggaaggtgttaggcagatgaagaggctgatactggtggggtatggcaaagagaaactgggggtgaggggggttttcaagtttgatgaggggttgaaatattttatttcatatattttattttttactgtttacttgctctctgaccttgggtgaattacctaacttttctgtgccacaattttccatctgtaaagtagttattatactgtattagtccgttttcacactgctgataaagacatgtgtgagactggccaatttacaaaagaaagagatttaatggacttacagtttcacatggcggggggttgaggggctcacaatcatggtggaaggcaagaaggagcaagtcatgtcttacatggatggcagcaggcaaagaaagagcttgtgtagggaaactcccatttttaaaaacatcaaatgtcttgagattcagaactgcccccataatttaatcacttccccccgggttcctcctaggacacatgggaattgtgggagttgcaatttaagatgagatatgggtggggacacagacaaagcatatcattctaccccagcccctcccaaatctcatgtcctcacattttaaaaccaatcatgccttcccaacagtcccccaaaggcttaactcatttcagcattaactcagaagtctacagtcctaagtcttatctgcggtaaggcaagtcacttctgcctacgagcctgtaaaatcaaaagcaggttagttacttcctagatacaatggcggtacaggaattgggtaaatgcagccattccaaatgggtgaaattgaccaaaacgaaggggctacaggccccgtgcaaatcagaaatccagcagggcagtcaaatcttaaggccccaaaatgatctcctttaactccatgcctcacacccaggtcatgctgatgtgagaggtgggctcccatccccttgggcagctctgcccctgtggctttgcagggtaaagtcccgctcctggctgccttcatgggctggtgttgagtgtctgcggcttttacaggtgcgcagtgcaagctgtcagtggatctaccattctggggtctggaggatgatggccctcttctcacagctgcactaggtggtgcccccatagggactctgtgttggagctctgaccccacatttcccttctgtactgccctagcagaggttctccatgagcactctgcccctgcagcaaacttctgcccgggcatccaggcatttccatacatcctctgacatctaggcagaggttctcaaacttcaattcttgacctctgtgcacctgcagactcaataccacgtggaagctaccaaggtttgggattccaccctctgaagcaacagcccaagctgttacttttagtcatggctggagcagctgggacacagggcaccaagtccctaaactgtacacagcagagggaccctaggtctggcccacgaaaccattttttcctcctaaatctccaagcctatgataagaggggctgccacaaaccacaaaggtctctgacatgccctggagacatttttcccactgtctcggggattaacatttggctccttgttacttatgcaaatttatgcagccagcttgaatttctcctcagaaaatgggattttcttttctatagcattgttaggctgcaaatttttcaaacttttatgctgtttcccttataaaactgaatgattttaacagcacccaagtcacctcttgaatgctttgctgcttataaatttcttttgccagataccctaaatcatctttctcaagttcagagtcctgcaaatctctagggcagggacaaaatgctgccagcctctttgctaaaacataacaagagtcacctttgctccagtttccagcaagttcctcatctccatctgagatcaccttagcctggatttcattgtccatatcattatcagcattttattcaaagccattcaacaagtctctagggagttccaaactttcccacatttttctgttttcttctgaaccctccagactgttccaacctctgtctgttacccagttccaaagttgcttccacattttcgggtatcttttcagcagcaccccactttactggtaccaatttactgtattattcagttttcatgcttctgataaagacatacccaagactgggcaatttacaaaagaaagaagtttaatggacttacagtttcacatagctggggaggcctcacaattatggcagaaggcaaggaggagcaagtcatgtcttacatggatggcagcaggcaaagagagagcttgtgcagggaaactctcatttttaaaaccatcaaatcttgtgagactcattcactatcacaagaacagcccagaaaagatctgcccccataatttaatcacctcccactgggttcctcccatgacatatgagaattatgggagttacaattcaagatgggatttgggtggggacacagaacaaccatatcatatactaaactcacaagttgttgtaaggattaaacaagaaaatacatttacatttttgagacggtgcttggcagatagcacatgctcaataaatggtagctattattattaacattgtatgaggattagctgcagtcagtagagagtgagatctatcggagtaaatacatctgactgtatactgctagtgaggtagtcagaggccccactgaagacaaagataaggatctgaagaactgacagcttgagaataagttttcatattgttccaaggacaataaaaagatggatttaatacagggaagttatatgatcacttgcctattttagaaagttttgctgccactgttcatgtcttgcctgttcttctacaaggtacatttccaagctcccttgcagttaggggccatatacctaacttttggccaagggtttgtattagtctggactcacaagagaaacaggaccaataggatggatggatagatagatagacagaaacagatttattataagaaattgtttcctgtgattatagaggctgggaagtccaaaatctgcagtgtgaactggcaggcagaggctcaggagagtctatgatgccaatgaaatgtgaaggtagtttgctgaagaattccctcttgcttgaggaggctggtctttttgttctattcaggccttcaactgatcggatgagcctcatctatattatggagggcaatcttctttatgcaaagttcactgttttaaatgttaatgccattcagaaacatcatctaagttaacacataaaattaaccaccaagggtgtgttgggcagaagtgatgtgtgccccttataggcagggggtctaaccctcttgtgtacaatcttccatgctttcttcctttgctacttggcaggtgagaggtacagtatctagaataggatgtaaactctagggggatgaaggagccactaggaagaaggaagcaagtccttaaaagattaggtggaatagacatttatccacctttgtctctcattgaattgagacgtgtgagaaataggcagatgttgtgttaagctttgggacttaggggttgtttattacagcagttagtatatcctgactgatgaatcattctggcagcagggagggcaatgtgttgacacaggttaaggctacagtcaggaaggccagctaggaatttttggtacaagtccaggcaagagataatgctgagctggactaggttgatgcagcatgtggacagcagatgtttaaattaatcatactgtgagtagtaataagcatttagtgctttaccaaattatctcagtgaacactccaaatttctattttttccaagaaaaagaataaattgacagattgtccagatttattccacaataaaggaaagttatgaaatatgatgctatttctggtttcttatttacagttaagttcatgttcaacttaaccaaaagaatcttagggaaagttgaagtgataatgcttaattaggaggtacatggcagtacagttagagtgaagaaaagaagaagtgagacagagaagtctaagaagcaaattcaaggtgatataccaagtgggccactgcttatggctctaaaaaaaaaaaaacactgtacctcagaacaacccaacagatggaaaattgtgggggaaatttatctgtgagctcactcatgtctcctgtctcctgttggctaaaggtcattccagagaaaatttacaacattgttccactgctttagaggtggagcgaggcccagagattctggatgtctggacagcctagtatgacttgctgtggctgcaattactacagagaaagcagccaatggcccacaaaatagatgaggctgaagaatcagaggagacactcaagatgggttgataaatctggtttggaactcatcagtggtagctctgataaggttgttagcacacttatctatgaagtactttaattaaataaagggttatttaattgcccatgtagtgtgatagtattactgctatttatgtggaaattaaacacaataacaacagcaatgttttacattagatttcaggaatgtggggtgacattccttatgaggtcttagctttaagtttattcttttactgaatgcactgagatgtagctcctaaaggttgcgaactctgaatatctgagacaggtctcagttaatttagagagtttattttgccaagtttgaggacatgcagccgtgacagcctcaggagtcctgaagacacgtgcccaaggtggtcagagcacagcttgcttttattcattttagggagacgggagacatcagtcaacatatgaaagatgaacattggttccttctggaaaagtgggacaattggaagcaaaggtgggacaacttcaagcagggaggggacttccagctcataggtagataagaaacaaatggttacattcttttgagtttctgattagcccctccaaagaaggcaatgagatatgcatttatctcagtgagcaggggtgggggttggctttgaatagaatgggaggcaggtttgccctaagtagtcccagcttgacttttccctttagcttagtgatttgggggcctcaagatttattttcctttcacaagcttttccattatttacagcagactttgtctttttctgcctctttttttttttcctgccaaagtctgcattatcaccataaatgctgacaactgccctatgaggtaggtgtaagcatgggctcaattttacagatttgtaaaataaattaaaaaaagtaaaaagatgttaacaactttcccacaagatctcagaggacattttatataacattttccctaattcttcagtttttttttttttttttgagacgaagtctcgcattgttgcccaggctggagtgtggggtcacaatctcggctcactgcaacctccgcctcctgggttcaagcaattctcctgcctcagcctctggagtagctgggactacaggtgcccgccactatgtccagctaattttttgtatttttagtagagacggggtttcaccatgttggtcaggctggtctcaaactcctgacctcgtgattcgcccacctcagcctcccaaagtactgggattacaggcctgagccactgtgcctggccagttcttcagttttatacaagtcccaaaggccaggaacaaaatacttgttcttaagtagccctataatttagaaaaggtgccaaactactcatgtggaactagaaagatggcaacacaaagatagctttaaacaatcacttacttgagttttgaaacaggttgaagtcaaagaagctgagagtcaggaattctttggagagtgttgttgacatgctgttcttcccctctccctttctttggaagagaaggatgttgaggaacgtgagggtctcttggagtttgagggatagagtgtctgatatttggctcatgcctgaggaagctaaaggtgagaggctgtggctggaggtgcctctgcccggtagcaccatacaaagtgctaaacagggagcaaaggcatgtacacaagggggagaataaaagtagcatttcctgtgaaagctgtgtgaatgcagaaaagagagctggtcagcatcctccgctggagtatagctgatggtgaagggacttgaggagagaaatgggcagccagaagcccaagggccagcaggagggagcagtaagtagcctgtgggaggagaggcagttggtgcactctagtgcaaaggtgtccgagggctgtctccaaaaaccctttattggagaatcagccttggagaccggagagaaatgatgtgagatcacaactgtgtcaccatggagcagctgtgcactttcctgccaactcctcttccctgggcctgacctagcaggagaggaggtgaacaaggaagagaaaggaagccagcttcatcctatttgcccattgcaggcttccaagtctgaagctgggagagaagagaagttttaacttgaaatgagattgtcattatacaattagtcgggactgttctgacctggactttttattatctgaaatctctagactgaaggactttttagctgaacataacataaaaatcaataatacatgcttgatattgcattcagggtagaaattaataagtctacagaaataagtttttcttttttgtacattgtcatcatatccaccttgtaaaaccaaataggtgcactgctaatcattctgttatattaccacagagcttgtccttatctggctctgttaaaaaaatgctacataagaagacaaagacaccaatcaatgatcactcattaagcctgtggtctgaattagttaatacagttgggaatcaggattaagacattctaaaggcaaatattataaaaagaatagtctggaacataagtcactggaagtttaggttaaagagtgcattagtgagcaatctgggcagccaagctcaagggagggggcactagtggccgtgtggggtggaagaaaggaaaggacacacccctgaggagaatccaatctgcgtatgagcagcctctgtaaattccacctgatgcgacctctagtggtcactctagtaccatgctacagtgtgcatatccaaaattgtgaccagtccataacatgaaagttgactctcagttttcacaggtttaaaattttagaactgtgcaggcagagagctcttaatacatattaatggtttgattgctcaggtggagaatgggtgaagatgtatgcacctgggccagtttcctgatagctgactttcatgctgagtgtaaatttggccacacatttgaagtgtcagagggcaaataggaaagaattaaataactcattgatttctcaactgacctttggcattattcataaagagtacatagaaggctttgaataaatgcttgttgaataaataaacaaggagctactccttatggagtttgctttttcattgtcatgaattgggagatttaaattataggaacttagtatgttaacatccacaaattttaaattcgcctgcgagtaaaaggataaatttatttataatagatttggatgattcctatttttgttattttattcattacattttatacaggcaatccaggactataagtgagccacacactttctgagttcctttgagtaaatgactattccatgttggttgtccagaaaggtcaaatagtggacccaatatcttttattggttattttcaaagtttagtaatgtagtgattataagtttctttgagatgtttattctttttctttgtttactcatgaggatataatttgagatgtttaatagacaattagtatttcaaaacttattttaatttgtggtttaattaatagtaatttaattagttccaataagcataatgagaacataaaaactctaaattagtaggtgtaatgattcttgtctttcctcaagagggcagcaaaaccgcactgctcagttctcaaagatcaggatgaaaatcttaaaaagctgatacacagacagctttcatattagtccaactaattaaacataacatgtgttgatatttgtattgccattttacaaaagtttagcttttcctttatgaaatgaaaaaaaaatttaattctttgttttaggttagacaacagaattatacttgcctagggtctcaacacacattgtttacacaaggacaaatgattaagtaagctactgagggtaacaaataaataaggtgggttttttttttttttttcctgaagtgtattagtccattctcatacttctatgaagaaatacctgagattggatagtttataaaggaaagaagtttaattaactcacagttcctcattgctggggaggcctcaggaaacttataatcatggcagaaggcaaaggagaagcaaacaccttcttcacagggcctcagcatggagagatgcaagcaggggaaatgccagatggtgataaaactatcagatcttgtgatactcactcactgtcacgagaacaacatgacagaaaccgcccccacgattcatttacctccacctggtcccgcccttgacacgtggattatagggattacaattcaagatgagattttgggtggggacacagccaaaccatatcaccaagttactaaagtgatcgtacttgaatacagttgggaatcaggattaagactttctaaaggcaaatattataaaaagaatactctggaacataagtcactgggaagtttaggataaagagtgcattagtgggcaatctgggccattttggaaattgcctttctataatctatcctaggtagaaagaccttttaaatacacagacacacacacacacacgcacacacacacagacatacacacatatgtgtatgcatatatgtatatgtatgcatatatgtgtatatgtatgtatatgtatatctgtgtgtatgtatgtatatctgtgtgtatgtatatatgtatatatgtatatatatgtatatatgtatatatgtatatatatgtatatatgtatatatgtatatatatgtatatgtatgtatgtgtgtgtgtatatatatatatcccagagttgaagaaaacttgaatattggctccagaaaaatagggaaatgagagggagttgaatatacccctgcccacacgtatagaatggaatttgggcatttcctaggcagattatagatgaggtttgtctttagcgcttataacattgtctttgatatcctctctgttcctggcttgctacgtgctgttcttatatttagaaggtggtcatatggtcctgacagttgttgcctaatagtggttcaaaacatttcttttctgtggtatatttgcatttaatagaggacaggagaaggctggaagattttcaaggcataaaggaatggactataatggatcctcagaggcctgcatcctgccctggggctcctgctttcattttaatagcagcagctgtagggtgggaacagggagaccagcacctacatgtgccacaatgaccaaatccaccactgtttctgccagagggaggtacgagtgggccattcaccttatagctgcctgcctccactgctcatgctgatagaatattctgatggaccatagagttggagcatttggtccatagtaggtttatcttttatatatagtaggcttccaataaatagttgttaaatgaataaagacctcaaatgataaatgaaagatgtagctgctcttccacctacgcaacacacagaataaaaatcctcttcctttttgtgaggttaactaactttgatggagaaaaatttatattgttactggaaagggtacaggtatattcagctggaagcatttgatgattctttgttccattatattgaataggttcactagggttcaaaacaggttcaatggcatggtggccatcataaacaaatttaaagttcgaatttaagggttgttctcatctttcaaatatttaaagatcttgtaagaattaatatttatcaagcacttattctttgcaaatccctatgctagttttgttttgacatttactgcacagtataaaaagaataaactatactcttgtcttcaatgaatttatagtctccctggagttccaagactagcacacatgaaaacatcactaaagaaggtacagtatagatcattaatgcaaatgagtaagtgccatgtcccgggattaaaagggttctgaaaagggaaagtcaataagaggtagagatgctgggggaaggctacccaaagaaaaaggaccttgaggtgactcctaaagtacaggtagagtttggatacagagacaaagcggggtgtcctaggaataacagctgtataaagatgtaagaagtgctgagcatggtacgttttagaaaacagattagaaaataactgcaaattgggtaacagtgggggccaaagttggaaaagtgattaggtttttagaattgaatctaaaaaaaaagatgaattctataacattattgagtaggagaacaatgaaaggatagccatgtttccagataattaacctccttacttcccctgctgtggaaaccaagtctgtagaataattggaaggggagaaatgtttggggtgattagaggatggtgggaccagtttacttcttaactgtgaatactgtacttattgagctgaattatattttcaaacgtatacaataacattttaataatttaggcttagaaataataaatctgtatttcaatttttattctaggatagtattagtgatagattccaatccctgaacttcatgcaagtatcatagtcactagaaatccacttaagagctgagatccattggtggtacatttttattttttagtaaggagctgtttctaatgtcaacactggtaaactaatggtttgttggaagaaaagacagccaacatattcagtcaagaacattttacttgttccatgtgaaaatccattatagaaacaatttctttttttatcctgaaataaacatatattgcagaaacagacacaggatattttcatgcctcaaagtaatgtctttggctagttgctattgagtactttcatgatgtgaatatcatcactaacaattcatcaattctaaactagatttcacttaaacttgcaaatttaccattttaatgacatatttaaaaagttttttgaaagaaaaagtacaaataaaagtaaaataagggcttctggttcaagatggctgactagaagcagctagtgggttcctcttccatggagatgaatcaaaatagtaaatattcacactttgaatagatcatctaaaagagagagcacaacggaattcatcagagaagtgatgggaattatggaaagcaaagaaaggtgaagccatgcagcctgctgagctgggattggtatggagccaggagtagctccctgacatggggaagggctgagtgagcaacccctggggccccactcccagtgtggattttcacaatcctagcgatgggagagctccctgaaccccccggggcctccagtctaacacagggaacttgcccggagattgcgcagaggcactgcttcggcccacatggaattccacaggcttttcattcctgaaacgctgcagcctggtaccagctgctgttgcagtgccaggagggagtggggagggagtggggaggccaagtacttttgcacaccccaaagatgtgtatcacggctgctgctgctgcagggtagaggagcaagcacattgagcacccttgctttcactgttcccgctaagggggacctgccttccctaggctcacagtacagccaccttgcttctgcctgagcattttggctgtggcctggcacccttctgagagcccagcccccagaggcctgcagtctgccctggggatcctgctgctgttgctgcaactgccaccaccactgccaggccaaggagggagtgggaagacaggacacctttgcacacctcagtggtggataccaccactgtttctgtgggaggaaggtgtgagtgggccaaaggccccacagctgttagctttcactgctctcactgagcagggctacccctgcctgtgcattttgctgttgcctagcacccttttgaaagcctagccctcagaggcctgcattctgccctggggctcctgctttcatcttattagcagcagttgtagggagggaacagggagaccagcacctgcatgtgccacaatgaccagatccaccactgtttatgccagagggaggtatgagtgggccatgcaccttgtagctgcctgcctccactgctcatgctgatggaatattccgcagctgcctgagtggtctgcctgccctttccaaagcattctgccagcagcctgggggccagcccaccccttcctatcacagccaatacctgaactgtgggaatttgaagacatgtttgctggtccggtcctggtttagtccctccaggactcatgcacattgtccagagagccatttaggaacctgaggattaggggattgcctagcccagtgatggcacctgttcattccctctggggtctgaggttgaactaatccaatcacctgacaccaccacagaggactcccacctgcatgtactgtaaggcagaaccattccccctctctctatgaagcagcagtgttcctacactggagaacaggagagccacaaagttgtctgtattgagctgagggaagagattccatgctgaagccattccagtgaagaatcacgggacaggtgttttccctggctttcggtgacattgtggcctggcgttagatgacagtgtctgcctgaactgagagtcatcagccctggcacaagggtgtgatacagaaagagactgtgttcctgtctgcccaggatgtggagctggtggagccccctctccaactgcagcaaccttggcacatttcaccaggagctccctcagtcactcccgtcagagctggtgcctgtgctcctcattgaagtattcatgggtgagcttggtgtttctgttcctcccaataaaccgagatcaagcaaatacccatctgcttctgtgacagacagctttttcccataagcaccacctactggtctggaggttgaactgcaaagcccgatacaaaacatgctaacaagaagtacacaaggctaaagaataaaagctaaaggacgctactcaacttatactatagtcacactgtcatggggaaaataatcccatctaaatgaaagtaaataaaaaacaagaagtgacagcttctccagatgagaagaaaccagtataagaactctggcaccatgaagaagcagtgttgagacatccccaaaggatcgtactagcttgctagcaatggattctaaccagaatgaaaattctgaaattacagataaataattaaaaatatggattataaggaagctcaatgaggtccaagagaaagttgaaaaccaatgaaacaaaatcaggaaaacaatgtagcatatgaaagaagaaatagatatcttaaaaaaagacaggcagaacttctggaaatgaaaaattcactgaaggaattacaaaatacaggcatgaatgaaactgggcctctatctctcaccatatacaaaaattaactcaatgtgagttaaagacttaaatataagacatgaaactatgaaaatcctcgaagaaaacatggggaaaactgttcagaatattggcctaggcaaaacatttatgactaagaactcaaaagtaaatgcaacaagaacaaaaatagacaaatgggacttaattaaactaaaaagcatctgccagcaaaagaagtaatcagtggagtaagcagacagcctacagagtgggagaaaatatttgcagactatgcatctgacaaacaactaatatccagaatctacaaggaactcaagcaactctacaacaacaacaatgacaaacaaccatattaaaaagtgggtaagggatacaaatagacactgctcaaaagaatacaagtgaccaacaaagatatgaaaaaaaggctcaacattactgatcatcagaaaagtgcaaactaaaaccatagtgagataccatctcacatcagtcagaatggccattattaaaaaactgaaaaacagcagatgtttgtgaggatgaagagaaaagggaacacttatacactgtttgtgggaatgtaaattagtacaacctctgtggaagacaggatgggtatttctcaaagaactgaaagtaggatctaccatttgacccagcaatcccactgttgagtatctacccaaaggaaaataaatcattttatcaaaaagacacctgcacttgtatgtttattgtgacactattcacaatagcaaagtcgtgaaatcagcctaagtgtccatcaatgaatgattggataaagaaaacgtggtatatatactcccgtgaaatgccactcactcataagaaagaataaaatcatgtctttgcagcagcatggatggatttggaggccattattctaagtgaaaaactgcaatggaaaatcaaatactgaaggggtgcgttgcccctccacacctgtgggtgtttctcattaggtggaatgagagacttggaaaagaaaaagacacagagacaaagtatggagaaagaaataagggggcccaggggaccagcgttcagcatacggaggatcccgctggcctcttgagttcccttagtatttattgatcattcttgggtgtttctcggagagggggatgtggcagggtcataggataatagtggagagaaggtcagcagataaacacgtgagggaaggtctctgcatcatagacaaggtaaagaattaagtgctgtgctttagatatgcatacacataaacatctcaatgccttaaagagcagtattgctgcccgcctgtcccacctccagccctaaggtggttttcccctatctcagtagatggaacatacaatcgggttttacactgagacattccattgcccagggacgggcaggagacagatgccttcctcttgtttcaactgcaaagaggtgttccttcctcttatactaatcctcctcagcacagaccatttatgggtgtcgggctgggggacggtcaggtctttcccttcccacaaggccatatttcagactatcatatggggagaaaccttggacaatacctggctttcctaggcagaggtccctgcggccttccgcagtgtttgagtccctgggtacttgagattagggagtggtgatgactcttaaagagcatgctgacttcaagcatctgtttaacaaagcacatcttgcatagcccttaatccatttaaccctgagttgacacagcacatgtttcagagagcacggggttggggtaaggtcatagattaacagcatctcaaggcagaagaatttttcttagtacagaacaaaatggagactcctatgtctacttctttctacacagacacagtaacaatccgatctctctttcttttccccacaaatactacatgttctcacttataagtgggagctaaacaacaggcccacaagaacatacagaaagaaatagtaggccgggcgtggtggctcacacctgtaaccccagcactttgggaggccaaggtgggtgcatcatgaggtcaagagattgagaccatcctggccaacatggtgaaatcccatctctactaaaaatacaaaaattagctgggcatggtggcatgcacctgtagtcccagctactcgggaggctgagacgagaatcacttgaactggggaggcagaggttgcagtgagccgagatcgagtcactgcactccagtctaagtaacaagagtgaaactttgtctcaaaaaagaaaaaaaaaaaaagaaatagtagtcactggagactccaaaagttgagagagagagtgagggtcgaaaaattacctattggatacaatgttcactgattaggtaatgggtacatcagaagcccaaaccccaccactatgcaatatatccatgtagcaaacctgcacatgtaccccctgaatctataaaaataaaaaaaaaaaacacattctcaaaaaacagtaaaataaagtagaacacatgaaagaaaatatatcacaaagtgctgagaatagaaaaaataacatccgaaagctctagaatttggggtatttcaccacttaacacaatttggtaaatgacaatggagagctttttaatactcagttcacattttgtctgtctttcactctctctctctctctccctattagtatagagtgttttcataaatgttttaagcttgggcttatcctcagtcagggttctttcttccttctttcctccattgttattcaagccattgttataatttgattttgttttctctctgtgtcttaaagtgtattatttttgcttttccaactgcaaaacaatagttgcatattttttggtccctttaagtttttattataacgtttttcatcccacctcttccttttataatgttaaatggcaaaatgtctataatatttaaaaatttgcttcctcccatcatcctaaatatcttattttttattataaatagacaaatttatgtgcatatgttttgtttgattttgttttctgaaacaaattaaaatttgtatgttcaaaataatgttgtgatatgaatactgcaggtgttatttctattttgggactgagaagttaggccaatagacacctatttattgaacttcttgaaggattcctgggcagcccgcagtgctaaggggaacaaaaatataataagtactagggatattttaggaatatttcctggcacctttttaaattctagtatttgcaaatatcatgagagaatattaatttcctcatatactttattcctggcagccaggagagttgaaaacaataaagctctattgagagactggactgtccaaattgttagattttggacctggcaacacccacaccaccacctagtatttcttgagggtttcatatatggcaggtactgttataaggacttttcatttatatacttatttattcattaaaatagctatatgatatacacagattatcataatcattgtcattttataaataataggtaatgtaggaaaaaatggttaagtaactgctagtggccactcagttggtaagtggtagagccatgaatttgaatccaggtattctagcttgagaacccacagtcttaaccacatataccttccattactccgtatttcttttccacagctcacaagcacactctgattaggggatgactctcttctggtgtgcgtttagacaaattgtacattgtttcatggcagagacatttgggattgttttgaaataaaaatgaataatttaagtgacaaatgtcaagaattatcttttttaacaaaatacattcaatatagttggataaattagatatatagatgacataattgatgcacaaagtagaaatatctataccagcagtgtatcctgatatattaaatctctaaagagtgtagcatggagaataattaggaaagaaaggattggagagagatttggaatatatgcagagaaagattgtatcttctgaggatgttgaagagtgtgtaggttttgaagaagtgatgggtgctgattgaggtgatgtaagggatagagagaagagcacgaagacaggagtgcatacactatttgaaagcaataaaaagtgatgagtgccacatctaagcaaggtgttaagctctgaattgcagtttgccatgctttcttttcccctttctgtgagcctggcaattttttagacaggggctgctttatcagcttgaattgcagggtgaagaaacatgaagcagagtcttctgacaactcattatcatatcgtagaaatagaactttcttattgttagccaggaagatttttgtggaacttattaatgtagcattttctaccttataacactggttggcaggcaatttcagtatcccaggcataaagggctaaggattcaggcaatgaaggacaggagcaaaatctaaaagtcattgggaaggaaggcttgaaagaccttggtgactgatgggttacgaggtacaaagatttagaagaaactgtgacataaccttaatgattttggtttgagaaaataaatcatcaaaatgaggaagcaagggtggaaacaagtgtggaaggtagatttttaataggtgggagagagacccttaaatcctttttatgaaattaaagatagtataagatgatgttaaaaaaaaaaaaaagaatcatcagaaagagtccatttggaaaatgtggtagtttagagaaatttcatagtacttagaatgtgaaacagatccaatggaaagctgttgtttcattatgttttgttttaaagtttggctatacatttgcatacttaaaataataaaaacatataggaatccagcagtgcaggaaagatgccgtggacataagtggtaaaatatgagttctaaggtccacagaaattaggaagggatgtgactgagaacatacacggaggggtaatctttggagaaaggagagtaaatatctattaaaattttagaaggaagggccgggcgtggtggctcacgcctttaatctcggcaacgtgggaggctgaggcgggcagatcatgaggtcaggagtttgagaccagcctggccaacatggtgaatctctttctctactaaaaatacaaaaattagctgggcgtggtggtgggcttctgtaatcccagctactcaggaggctgaggcaggagaatcacttgaaccctggaggcagaggttgcagtgagccgagatcctgagattgtgccattgcactccagcctgggtgacagggtgagactccatctcaaaaaaaaaaaaaaaaaaattaggaggaagaggataaatgtagaaatggatatgcactgagatgaaatcagacactggtaaagttcaagatcttgatgatcccagagcatcagttttccactaaagtcagtgaagttatctgctaagtgggacagaaggagaggggcaggtgagagcagagaaaagagaagttttgaaattgccacagagaggagaatacctggttgtgattacaggattgccaaacacagagggcccgtttgaagttagactgtatgaattcataatgctccaattctgaataatcctctgtcttctctcagtagtgttcagtgtcctgggaacaggcagatcaagctcacagtgaacaggcagagaaagctcacgttgagggtgatccaggtttgtgattcttacagattaggttatttgcacaggtcatacttatagttctctttaatctgttctcattgtttcttcataaaaatacagtgtcttttcacagatacattttatattcctgtggttctgatgatcttcacactagcttgaaattcatctctttaaccactggagcctagatttcttttttacacttggctctttataaactatgatattaatttttggataatttttctaccttctcatttttttcactttgataggctttttcaaataacttttattggtgaaaaagttatctatagtttttaataaaattttgtcatctcatttaattcatctgtcagttacttaatcattatttcatgctgaatatgtgccaggtgctatgttaagggccaaggatacaaagataaagaaaacaaggtacctgtctttgatgtgtttatagagatcaaaagtctactgggcaagttcctaaactttgtataacttgtgttacaatggcttctgttctcatttggtattgggcaagttcccctcaccccacatacttttcattaaatttgtaatatttgcgaatttgaaaagtaaattttcattacatttggtttattaatacgtagttccccactgctggggctgatatttattgttacgaccaccttatcccactaggcaccacagtccccactgggttttgccatgtttgtgcaaaaacgctgccatttctacagactgtcccaatttctgttgctgtactagaacgcttaaatgttaatgatgattgctgacctatttggacacaaaggcaaggttctgttttcctatttcaagttacacttattgagaggacaagaaatgcagtagatacagttgaataaaaacagctactgcatatatatagatatatatatatctgtatatagtgcttatgaactccgattttaaataaaattagtggaaacccacattctttttttttttttttttttttttttttttttaaggaaagggagtctcgctccatcgcccaggctggagtgcagtggctcgatctcggctcactgcaagctccgcctcccgggttcgcgccattctcctgcctcagcctcctgagtagctgggactacaggcgcccgccaccgcgcctggctaatgttttgtatttttagtagagacggggtttcacggtgttagccaggatggtctcgatctcctgacctcgtgatctacctgcctgtgcctcccaaagtgctgggattacaggtgtgagccacggcgcccggccgaaacccacattctttgctttctaaaggtccaagctcttctgcaaattcccaggggcatacaaacatgtgggcacttctgatttcaatttactgcctctgctggattttttttcgtttctatcctgtctaatcttgtttccacataggtattatttaaatattgctccttatcaatatctacaaataaattatccctacactattctgaaaatctattggtgggaaatggggagaaatgtttataatttgaaaatgcaaacacattaaaattgaagatttaaaattttatcttattttttggtggtaaaaacacttaacatgagatccaccctcttaacaaatttctaagtgtataatacattattttgactataggtacaatgttgtacagcagatctttagagcttatttgtcttgcttcactgaagctttatgcctgctgattagtaactcctcatttctcctccccccacctcagtaactgccattccactctctgatgatatggatttgactattttagacactgaatataagaagaatcatgcagtatttgtctttctgtggttggtttatttcattcagtataatgcccttaagtttcatccatgttgtcacatattgctgaatttccttctttttaaagctaaacagtattgcattatatgtacacaacacattttctttatccatttcatctgtcagtgaacattaaaaacaataaagtaattcacaattaaataataattaaacaataaatataaatgttgataaataaaaaattaaacattacaaatccttattcataaaagtctgagaatgggcatttctcactaaccaaacatctaccatcctctcaattcctttccttctctgcctcttctctcttacctcttttactccattccaaagtatttacactcctcacattgtccgtgaataaaatccagtattaatttgggttgctttggatcttccttcagaatctttccctttctttaccctatgagctttatcaaacaaggtagtttctcatgcagttttcttctgaagtagaattccggaacccactcttaaggcaataaaacgttcaattttattacgtgtcttataatttcatgaatccaagtgaaaaagtggagggtgtacattgatgcaaccactttggcaaacagtttggcaggactagattcatgggtgtgtaacctgtgctgtcatagaggtttgtgaacttagaagggcccacacttcttttagtgtttgctgttgctgtcttgaaattttaataattttaaaacaaggagccctgtgttttcatatttcattggcccagaaagttctatatgtggttccacggtctggcattatttaacacagctgagcaaactcaatgtttcagggatttcacttctagataaaaacccaactgcagctcatatctatattcaccaaaagatattacagaaatatttatctcaacatattgtctattattcataacaggcaaaaatctggaaacaatcccattttcatcaccaatgaagaaacaaatgaattgagctatattcatacaaagaaatactacacagtgaagaaaattcatagtctagtgctataaattatagtgaactaatatcaccaacataatattagaaaaaaagacaaaaagaacagttcaatttaccatgaagtctgagatgaagcaatcttataaagctagaggagattatatagtggtagactttatggaagaaaggcttataaatagtaactgggaggaaacatgatggaggcccctgggattctgctaatagcttttcttgacctggaggggagttacaagtatgttagtttataaagctatacatttatattttatgcacttaaaacgtttcttatatgcacaaaaatttaaaagaatgcgtagcatggtgttgttaccaagagaaatcagggtgtatctatctgttgtgagcagggtagaagctcttctaaacaatctctgattaagaaactcattgtattaatagacgctcttcatcccctctatgagcacactgtcagattcttgaaactcactgaatggtcgtatctgtaaacttctctcttacataccatttcgataaaccatctgatttccacttggataagtgaacatctatggtaatagaaatatattcatgatacttaattttaaagtaaactattaataagaatttaagagaattttcaaggtccagagtgagactatgcctcagtaggagtctggtataaagaaacagaaagccaacatgaattgcttgccatctcttatctctaaatctttatgtgccctgtttcattcttgtcagtcttacttttctaatactcatctacttggtaaaatatggccatgccaaggttttcaaactcttatgttcctttagttcaaaagacaaggcagattgatatattctcaaactgaattctaaattttggggaagaaaatcccaaaacttaacttgcctctttttttttttttttttttttttcatccctgggccactttccaaggctagaagagagtcacacagcaataatatatttattgcagtccactctgtataacccccaaagcttgtttcttagtgcttaaaatacacatgcatgcataaattcaggagctgggctttttttttttttttttctgaatgttcaagtacaaccaccctggctttctggccaatgaattggccttgatttatagcacaaagggaacattgactagtattttattgaaacataaaaaacagagggataatgttcttatcaaatctccacttataagaaacatgacatcaaatgaatggataaaatattaatttttcaaaaaattattttgtgatatttggctatctatttttgggaaaaattatttttctactacatacctgtcttagttcgctcaggctactataacaaaataccataaactgggtagcttataaacaacagaaatttatttctcacagttctagaggctgggaagtgaaatgaaagatcagggtgctggcagatttgttgtatggtgagggccctcttctgggtcatagactgctgacttctagctgcacctttacattggtggaagggtgatgccactctctggggccacttttgtaatggcactaaacccattcatgacgccttcactcttatgaccttatcttccaacagccccatttcctaaaaccatcaccttggggattaagacttcaacatatacattttggggggaatacaaacattcagatcataacaacactagccattaaacaatgcagatagaaaaagtatgtaatagtaaaaaagtgtaaaaaacaagcaaagaaaccctcatgaccataaaatataagataatttgtttggaaacatgggcaaaagaagtgatgtttaaacatagtataatatggtttggctgtgtccccactcaaatctcatcttgaattgtaactcccacaattcccacatgttgtgggagggacccagtgggaggtaattgaatcatgggggtgggtcttttctgggctaaactcatgatagtgaataagttttatgagatctgatggttgtataaaggggagtttccctgcacaagctctcttgtttgctgccatgtgagatgtgcctttcaccttccaccaggattgtgaggcctccctggccacatggaactgtgagtccattaaacttctttcttttgtaaattgcccagtctcaggtatgtctttatcaggagtgtgaaagtggactaataatatatagtacaaaagaaaaaaagtaatgggaaaaattaatacatttgattatatcagaatttaaaacttaaagataccacaaaaatttaaaggttaatgtggtagtcagttttatatgtccatgtgggtaagcaatggtttcgtattagtcaataaaacccaaataggtgttactgtgaagatatttggaagatgatgtggtttggctccatgtccccacccaaatctcatgttgaattttaattcccagtgttagaggagggacccggtagaaggtgattggatcatgggggtggaattccctcttgctgttcttcttatagtgagtgagttctcatgagatctggttatttaaaagtgcatagcacttctaccttcactctctctcatccccatgtgaagatgtgcttgcttcctcttcactttttgccacgattgtaagtttcctgaggcctccccagccatgcccctggtacagcttgcagaactgtgagtctattaaacctcttttctttataaattacccagtttcatttagttctttttggcagtgtgagaacagactaatatagaagatttgattaaagtccatagtaagttgactttagtaatgaagattattctaggtaatataagtgaagtgggcctgatttaatctgttgaaagggcataaaagaataatttaggttttcctagggggaagaaattctgctctatggatagcagctttagtttatgtcaagagccccagcctgctcctcctcaaagcctgccctacagattttggacttgcctaaaaagttcccacagttgcataggccaattagttgcaataactcttttaatatatatcttctggaggttatttttctcttgatgaatattgagtgatacaacaagtgatagcttgaaagaaaatatttttgtgtgttatcaaaaaggagtagatttcagaccaggatggtgaagtaagaagtcttgggccccaattccccttacagaaagttcaactaccaactatttgtggactagaacattctttcaaaaaccggaacacctggaaacaagtctgagacaccagcgtgctatgtagaaatgaacaatatctgaattagaaaggtaagaggactagtctcactctgaccatgctctctgtcccccaagtcagcatagtgtcagacagagaggattttcctggactcagtttctacaatggggaaagaggactggggcaagtcactcagcttccttagcattccaaggtacttctaggaagccaagtctgatctcactccatggggaacactaagataaatagcatggcttacctgtccttggattaaatagaaacaaagaaatgtgaccagtgcacaaatcttggtggtagctcggtgttcctgccaactgaagcactcagagatatcagctaaacttatagtacactggcaaagctgagctgcttgactttagaaggatgatggaaatcataatctagcgtgagccactagactgttattcttcctagcttaagaacccaccccaactaccctgcccaattagggagactcccacttccatggatctcagcaaagcaaagggctacattggctttatccaggaaggtagacagcaactctgcatagccaaaaagcctgccctataaccctgcatagacagggagattctcgcctctgcagatctcagaaaagttaagtggctctacaccagcctaacccagaaaggcaagcagtggctctgagcagttaaaaaatcgacccaacaatcctgcccaggtagaaagattctcacctctgtattttttggagaaatgtaacagctagtcctgcttgatctgaaatgtcaaacagccacttatctaagccaaaagctcaccctacagctccacccagacagcgggacaatccccaattacacatttctaaggagcatagcctcaggtctcacctgcccagataagtgtctccatctaactttagggcccaacctgcagccatgcccaactgcagattccaaatagtggaaatgcccaagcagggggtatatcttgtggccagcctgaccagaagccatcacaatacccagtagctccacttgatatcaaagcaatggcagtggcccagccagctagagatcgcataacaagctctgcttccctgaggtcatcagctggcacttccagaatcacagctagactaaacagtaaaacattatcccttccaaagaacttgtaaggaccaggagaaggggctgtcttttcagatgcacagacaacaacataagggaacaaatattacaaagaattaggaaatcatgacgcttcagaaagaaactaggccaggcgcggtggcttacgcctggaatcccagcactttggagggccaaggcgggtggatcacagggtccggagatcgagaccatcctggctaacagggtgaaaccccgtctctactaaaaatacaaaaaaaattagccgggcatggtggcaggtgcctatagtcccagctactcgggaggctgaggtaggagaatggcgtgaacctgggaggcggagcttgcagtgagccgagatcgctccactgcactccagcctgggcaatggagcgagactctgttaaaaaaaaaaaaaaaattactaaagctccaataatggaacccaaagaaatggggatctataaaatgactaaaaaaaatttagaataatactcataaacaagtttattgaattacaaaaatacacagatagatttctaaaatttctaaaatttggaaaataatacccaaaaagtgagaatattgacaagaaaatagaaacagtaaaaaagaaccacatagaaatcttagagatgaagaatacaatgattaaacagaaatattcaatagaaagtttaaacagcagaattaatcaggtggaaaaaagggtcaatgagctggaagatagaacattgaaatttttcagtaagaggagttaaagaatgaaaaagaatgacaaaagtctatgggaattatggaattcaatcaagaaactaaacctttcaatcacaggaattccagaaggagaacaaagagagaaagggccagaaagcatatttaataaaatgatggctaaaattttcctaatctaggaaagataccaacacccaggtgcagaaagcatggaagtccttgtcaaaattaattcaaagaggagtatactaagacatctaataatcaaactatcaaaaattaaagactaataacaaattctaaaagcagcaagagatgagaaacatatcacacacaaaggaaggctgatacaactgtcagtggatttcttagcaaactctacaagcctggagagagtagaatgatatattcaaagtgctgaatgaaaaaaaagtcaacaaagagtactttatccagcagagctgttctttagaaatgaagaagacagagagttagcaaggttgttgaattcaagttcatcttaaaaaaaaaacctattagcattcctatacatcagtaataacaaattagaaaaggtaatagaaaaagagattctaggttgggcgcggtggctcacgcttgtaatcccagcactttgggaggccaaggcgggcggatcacgagggcaggagattgagaccatcctggctaacatggtgaaaccccgtctctactaaaaatacataaaaaattagccaggtgtggtggcgggtgcctgtggtcccagctactcgggaggctgaggcaggagaatggcgtgaacccccgggggcggagcctgcagtgagccgagatggcgccactgcactccagcctgggcgacaaagcgagacagagattttcccagacaaagaaaagctgagagggttcattgccagatctgacttacaagaaatgttaaaaggagttttcaagctgaaaagaggtattgaagtcccctgctatattatatttcagttaatttattcctttagatttattaatatttgctttgtatatgtaggttctttgatattgagtgaatgtgtatttatgatggttatattcttttactggattgactgctttatcattatgtaatgatcttctttgtttcttttaatggtgtttaaagtctattttacctggtacaagtaaagctacccctgctttcttgatttccatttgtatgaaatatttttctatccctttactttcagtctatgtgtgtccttaccagtgaagtgagtctcttatacgcagtatatagttgggtctgattattttatccattcagcctttcaatgtcttttaattggagaatttaatccatttattttcatttgttttatttctattggttttatagatcctttcttcctatcttcctatcttcctttgtggtgaaattattttctctagtagtatgttgatttcttgctttttatttttgtatatatattacagatttttgctatgttgtaattacagataaattattaatactagtaagagagttagcaacattccaggatacatcatctattagaccacaaaataagtcttaacaaatttaaaatgttttaaatcatgtctagtacttgttctgatcataatggtttaaaactagatatcagtaataggaggaacttcagaaactttacaaataccttataattaaagaacatgctccttaacaaccaacaggtcaatgaagatattaaaaagaaaattttaaaaattcctgagacaaatgaaatggaaacacagcataccaaaacccatggaatacagtaaaagcagctctaataaggaagtttatagcagtaaacacctaatacaaagctcccaaacagcaaaagaaataatcaacagagtaaacagacaacctacagaagggagaaaatatttgcaaactgtgcatctgacaaagtgctaatatccagaatctacaagaaattcaacctaataagaaacacacacacagacacacacacacacacacacacataacttcattaaaaagtagtcaaaggagacagacatttttgaaaagaagacatacagacggccaaaaagcacatgaaaaataaaaaatataaaaacacagatgttggcaaggatttgggaaaaagagaaagtttatacactctgggaatgtaccagctctttggaaaacaggatatggattgctcaaaaagttaaaaatagaactaccatttgacccagtaatcccactcctagatatctgtccaaaggaaaaaaaatcattacataaaaaccgtgcctccactcatatatttttgcagcactatttataatagcaaagtcctggaatcaatctaagtgtgcatcagcagatgattggataaagaaaatgtggcatatatatactatggaatactacttagccataacaaacaatgaaaatgtgtcttttacagcaacatggatgaaactggaagccattatttacgtgcaacaactgagaaacagaaagtcaaatatgcatcttctcacttataagtagtagctaaataagggtagacacagacatacagagtggaataacaaacattggaaactacaaaaggttgaagtatgggagagggatgagaactgagaaattacctattctgtacagtttacatttttaggtaatggtactcgaaaaacccagactttacctctacataataatccatgtaacaaaaatgcacttgttcccctaaatctacaaagataaaaagaagaaaaaagaaaaaaaaagtttatgttaaaagaagaaagatcttaaataaacaagctaacattacacttcaagaaataaaaaaaacaagaactaattaaacccacaattaatagaagggtggaaataataaagatcagagcagaaataaatgaaatagacactaaaaatcaacaaaattaagagtttgttttttgaaaagataaattgacatttagctagactaaataagaaaaaaagaggaaataaaatagcaggtaaaaaagaagacattacaactacagaaatataaaggatcataggagtctataacaaacaattatatgccaacaaattgaataaccctagaagaaatggataaattgctggacacatacaatctatcaagactgaatcatgaagaaataggaagtctgaatggaccaataatgagtaataaaattgaatcagtaataaaaaatctccaatcaaagaaaagccccaaacttgattgctttactgctgaattctaataaacatttaaagaggagctaataccagttctaatcaaactactccaaaaaaatcgaagaggtagaagttcttcgagactcattctaccaggccagcattattctgttgtcaaacccagacaaggatgcaacaaaaatcaaaatcagggcagtcatgggatacatgtaactatggaatgcaaaatttggatatggagttagaatacctaactatgcaacactttgattactttcagctgacctcttttgtttacaccagttttatgggcccctgagtgtggtgttagtggtggttacaatattgacctgctagctacatgaagctgctcaacagctacccagtcttcatgtccttttgtgaactatttctagaaagaaatggattcccagctctcagttgtaatctaactgcagagtaatgttggataatacatcagcctcaagaaattttccagattaaattgtctgagtgagaagtataaaagtgtatctactggaaatgcaagctaattatgtcacattcttggcttttcagttttaagttacatgttaaatgtgtatttgaagaaagagcttctagttaaagactgtgaaaaaaaagacattttgtctccatttcattcactcagaaattgttaaagaaataaattcagtcaaaagctgtgtctatgtgggagggggtaaaaaagtggggaagagatgaagttcctcttcactttcaatgaaagaggaaatggctgtgttcccatatcctgaatttgtcataaacctgccaaatatatggaatgtggcctggaatgagagagaccatgctcagtactgacctatctcctctgatctttagcaggaaattgtaaaagtaaatgttatagtcttgaaagggctagccaactattatttgattaaagtgaagtgagccagagagatggatgggcaaccagagaatataataaagatctaaagtaaagggggtaaatatgatagcaaattgtttcttatatctgagatctagctcctagttaagggaaaatgcttgggggaggaggaaagtaaagatggaatatttccagataacaaccaagagaacttgtggattgaggaacatctgcaatttcttaaacagagaaactgcagatactttttcagaccaaaaataaaatagaaaaaaataccaaaaaccaaaatcaaaacaaaagaatagattttgtaaaagaatgattaagacaataccctaatcaaaattcaaaattctcaagtgcttcacttcattctgtctttgccacaataattttaaacaacaatattgaacttattaaaacaaagctatgagaagaaatagaccagtttgagatacatttctaaaaagggcacaaatgacatacattataagaagaaaaacccaaggaaaagcagacttgttaagggaaacgttttctatattaaaaaaattacaaataaaaggagcttttaagaactcaaaaaaggtatataataattcaaggaagaaattgtacaaaatagatggagattaagaccaaactagtagtgcttgagaataaaatgagagagagagaaaaaaaatagacatattacagagatgatgctactgtctctggttagaatgtagaaagaagtaaaaagcctatggtcccatcataacaagaaatcctagatacacaacacacacacacacacacacacacacacacacacacacttctttaaagccatctaagaactgtggatataaagtacaataaaggagtctatagaagtctaaagatttttatgttccaatgtcaggtagaactagaggatacttccatactttggagcaattgcagagattgcgggctgggtaggcagaggagcaagtctatcattggttggagagaaaccaatcagcttttgacaaagtataaggatagcatgccagacataaaactggaagagccccaattgccaagtaagtcctctctggacagtcattttttcacatgtaaattttgccaagtaagtgcagactggaaaaaagtctgaaaaagagaaacagatttacagtcgtgaaatatcacaattttgaagtctcactgtcttgcttcttatggtcttgcaacctcacagtcacaaattcctgtggtctgaggtcttaaagtatttcattggttggagagaaaccaatcaaattttgatgaactaaaacatacttacgtataactatatacatatacattaataagtgtatatattcttatataagaatatgtgtgtgtatatattactctatacgtgtgtgtgtgtgtgtgtgtgtgtgtgtgtgtacaaatcaatggttaagttgtttagtggcatgattactttggtggggccttagaatttaagcaccaaaagtctaataagacttctattttctttcagcctaggatccaatttcctgtgttgccacagggctgatatctttgatctattaaaatctgcattggtataggtaggtggcaggtatggttggattctgttcaactgtgtctttaatcactttgaatataaggcaaggctttctctctaggagggcgtaaggacagagcgtcatcaaacttcaatactgagagtctttaagactaagagaccatgagatctcaatattgcaagactgtgagactgtaaggcagcatgctgctatgattttgaataacaaaagactgtatccacacaaacagacacacacacaatccacatgttagatttagcaggcagactttaacttatagctatattaaaaaattcatagggtaaagagtcaatttcaagagatatttgaatgtataaaatagaacaaaattgaaatctaatttggaactgaaaagtaaaatatacttaaaattaaaaaattgatagatttgcattagcttggacattgcagaagaaattacaagtaaataacacatcaaaataaactattcaacataaagcacagagagaaataaattgatcaaattgaacagagcctcaatgagctgtgggaagttacaagtagtctcacattcatatgatagaaatattggatagaaaagagaaaatgagagaataatatttaaagagataatgattatatgtctttaaaaattttaagaaaggccaggtacagtggcttgtgcatgtaatctcagcactttgggaggctgaggcaggaggactgcttgagcctaggagtttgagaccagcctgggcaacatagggagaccccatctctagccaggcacatggtggtgcacacctgtggtcccagctactcagaaggctgagttgggaggatcatttgcacctgggaggtcagtgcttcagtgagccatgattgtgcagagcaatactatgtctcaaaaaaaaaaaaaaaaaaaaagaaataaacctacaaatccaagaacgatgaccaacacagcaagataattacaaggaaaactatttttaggtacttcatgatcaaaatgctgacaaccacaggtttatagaaaattttcaaagtattcagaaaaataagacactttacatgtagggttaccatgataaggatgatggctgtcttttcctctgcaataatgaatgccagaagataatggaaaaacatcttttaagtgctgaacgaaaaattacttaccgttaaccaaagaaaaaaaatccttaaaaatgaagaaaatagagtttaggataaatgaaacccacgctaatatattgccaatagaactgccctacaaaaaaattctaaaggaattttttcaggttgaggagaaatgataccagatataaacttgaacctagaggagaagagattatgtgcatttgaaaatagtcaacatgtgggggacataaataattatgtttttaaaatgttcttattttctatttaagaaaatggattatttaaagcaaggtatttgtccattctctcactgctataaagacactacccaagactggataatttatgaagaaaagaggtttaatcgcctctcagtcccgcatggctggggaggcctcagaaaacttacaatcatggcggaaggcgaaagggaagcaagggacatcttacatggcagcaggagagaaagacagtaggagtaactgccacttttaaaccatcagatcttgtgagaactccctcactatcatgagaacagcttggaaaaaattgcccccatgatccagtcacctcccaccaggtccctcccttgacacatggggattacaatttgagatgagatttgggtggggacacagagccaaaacatatcaagcaataataaaataatataagatttacatactgaagtaaaatatttgaccacagtgccccagataataccaagtaaataatggaattgtaaataatattcactaagtatataatattaactcaaagcagactgtaataagttaaggatgcatattataatccctagagcaagaattagaacatacaaattagcatagctagaaattcagttgaagcctggtataatgttgcatgcctgtagtcctagctattcaggaggctgaggcaagagtattgcccaagtccaggagttagagactacagtgagccacgattgtgccactgcactcccgcctgggtgacagaatgagattctgtctctaaaaaaataagaaaataataaaaattcaattgagaaaataaaatactttaaaaactcaatactcaaaccaaaagaagagagaaaatgagtacaaaatgtaagaaatacaatgagcaagaaaatcaaattgcaaatggtaggctaaaacctgactacataaataattacattaaagtaatggattcaaatctgaaattataatatagagatagagattaaacaaagtaagaccatactataaactatttaaatataaagactagtctgggtgtggtggctcacgcctgtaattccagcactttgggagcctgaggtgaaaggatcatgaggtcaggagtccaagaccagcctgaccaacatggtgaaaccttgtctctactaaaaatacaaacattagctgggtgtggtggtgcgtgcctgtaatcctagctactcaggaggctgaggcaggacaatcacttgaacccgggaggtggaggttgcatgagctgagactgtgccactgcactccagcctgggcgacagagcgagactctgtctcaaaaaaaatttttttaaataaataaatgtataaatgtaaagactaagaagttgaaattaaggatgaaagcagatttaacatataaacattaagcaaaaagaaaaaaatttgtgttgtggccataatatcagaaaaagtagattttaagacaaggagtattacaagagataatgagtgatattttgcaataagtggttaatttattgggaaggcataaaagtcttaagtatatacaagaaaacttcaaaatacacgatgtaaaaggtgtcagaaataaaggaaagaagagataaacccaagaacatagttgcaaattttaacatccttgtgaaggttaattttatgtataagcttgactgggccactagatattcagatatctagttaaacattatttctgggtgtgtctgtgagtgtttctggaagagatcagcatttgaatcagtgaactgagtaaagaaggttgtcctctccaatgtgggtgggcaaccaatctgttgatggcctaactagaacaaagagacagaggaagggagaatttgttctctctgcctgactgagcttggacatcagtcttctcctgcattggactgtgtttataccatcagtgcagctggtcctcaggcctttggacttggattggaacttgaagtaaaggttctgttgtttctcaggcttcagactcaggctggaagtacaccaccagctttcctgaatctccagcttgcagatacatattgcaagacacatgttacagctcagcctccataattcataagccaattcctccaattattcataattctctctctgtatatatttataaatatatatttaaaatataaatatataattcttatatatttatattttaaattaaatcatatattttatataatatctataattttatgtaatgtataatttttaaaaaatatttataatctgggtctgtttaggctactgtcataaacttttactaccatcaactggatagcttatagacaagaggaatttatttctcacagttctggaggctggaaagtccaagatgaaggcacaggcagattcagtgtctggtgagagcatgtccattaaggtgttctaagcaaaagagcagttcttttctaagaaatttttaccttcaatgttgaccaactgaataaaaattcagccaccttaaaaatgataatttcttttttcactgaaataatcttacctgcctgaagtcatgggattaaatattatcctggagattcatctcatgattgcaggtggcattaagtgaatgattaaatggctattcttaatctcctattgtccatttctgaaaaagttttcctgagaaaaaccctgacttctttagtaggggttgtgctattattgtcatagatgtaaatactgtacaattgttctactcctttctcttgaaatcttacaacctgactttaagctccgctgttttattacttttttttcctcttggaaacacctttagttttcaggagagtcctaggaatattcaattaaaattctgcataatgactctttagacagtcaccaggggagtactaatgcagaaaccatgagaccagcttatcttagagttgccaaatatacctgaaaatcatataatgagtggattgatattgcacataagagtcagagtagtgggaattttgatttgccctcagaaatgatgtgctttagggaaaaaaattgcttgcttttttgggaatagacttttataaaaacctgaagtgctgtgaagcaagtcaggggatttgggttccagggcttgcatggtcacttactaattctgtggttagatgtcttcaatcctttatttgtcaataatttgtgaggctgttttgaggattaaacaaggatgtctcagaaaagagcttcagaaatatattaaagcccatctatctgtttgactgaatgccttgatcccggaagaaaaagattttgaggagttcatataactttcagggagtcttttcatatgttctatggggattgcaggctaggagtatcgagtcaaaagagaagcatctccatctgatatagtttgaatatttgtctgcatccaaatctcatgttgagatgtaatccccagtgttggagatggggcccagtgggaggtgttggaatcacgggggtgggtccttcatgaatgatttgggtcatctccttgatgacaagtgaactcttgcactgaattcacatgagatctggtcttttaaaaatgtgtgacacctcccctcactctctctctcatgcttctcctgccatgacacgcctgctccacctttatcttatgccataattgaaagcctcctgaggcccccccagaagcagatgctagcactatgcttcctgcacagcctccagaactgtgagctaattaaacctcttttcttataaattacctagtctcagatatttctttattgcaatgcaagaacaacctaagataccatccttccaatctttatatcagtttcttagtctgtttgggctggcataacaaaaatatcaaagactagatggcttataaacaacataaatttatttatcacagttctggaggctgagaggtccaagatcaaggcaccagcatattcagtgtctggtgagggcccacttctggtaccttagagagctatcttctcactgtgttttcatatggcagaaggggccagaaaattatctggagttttttctatgagtgcactaatcccattcatgagagctgtgtccttatgaccttaacccctcaaaggaaagaagagataaacccaagaacatagttgcaaattttaacatccttgtgaaggttaattttatgtataagcttgactgggccactagatattcagatatctagttaaacattatttctgggtgtgtctgtgagtgtttctggaagagatcagcatttgaatcagtgaactgagtaaagaaggttgtcctctccaatgtgggtgggcaaccaatctgttgatggcctaactagatgaggccctcaaaggcctcatcccaaatatatcacattggggattaggtttcaacatatgaattaaatcagatagttgataattgtcctggatttttctctcttattcactaactctatctaatcaatcattatgctttatcaactgtgcctcttagatatctctggagtctacttgaaatgctccaccttgaccaccaccaacatgtttaggccacaaccgtgtctcatatctagtttcatgtcagtctattcttcggttgcagaatgattttaataaaatgaacattggattatataacttttttacttaaaatcttttactgctccctccctccatcaagatagagtttaaacttcgtactcttcctacatgtttcctgatcttgctcttgcttcctttgtatcttcacctctattctcctccatgttttgttcatcaggcactaggaaaccacacagggtaggttgttgtaatgttatgaagaaaatccactgtgatgggaccatgaatagtggaaattggaggtctttttgtaccttttttatataagccttttgtattgctcatattctataaaccagaatctttatcttctgttcaataaccacaaagtgctaaaggatccaagatattaaaagagatgatggttcaagaaatagagacaaagccacattataaaaataataaaatataaaataaaatataaaaataataaaaataatctcttagtgcaaattagttctcaaatctaatcaaataaaacaagaggtatcggagtcctaaatattgtttataaagaaaatgttttggacttgggagtgtctgtttgaccttaccttttaggcagccttttttttttctttataaatacccctcagaactggaacttcaaaaaatattgatttaaactttttcttcagagggaaatgtcttcatcaattagtacagattgttattgatgtttccaagaaattttacaactttttgtttggcagaatacttcagtctcaacatcaaggccaagagtttttttcttacgcctaaccaagccctccctccctctttctaatttaggcacatttcctgtcattgtttccttggtcaagatgaagaataatttggtttatttttttactcactgtaacatttgtcattaaatttcctcatgggcttttcttctccagaggaaatgatcccagtgcctttattcttttctccaaatgatagttttctatttttctcattatattttatgttttttgcctttctgatcccctctcaaatttcttcacattcatgtaaactgtaaagacaaacactgggcacagtattctattagggtcagaccattgccaaaaaagaagtggaaggttgcttcctagctctaggcaagtgacactactgttaatatatcctggtatcatactacttctcccaacccccttctaataacattatcttcaaaagcatttgttcaatgtctgtgtgcaaagccagcttttagaagtatcagaagaaattcagatgctcatctgtttccatcagacacttggtaggaacaggcatccagtgttggaagccagagggatacaaagaaggaagattgtaaaaccaaagttaagattttctcagtggaagttagtgagaaagtaggagtctaagatggtagttttgtctaaaatttctggaaatatcaggagagagcagtacaacaaaggcaggtttactttgcagtaagcctttgataatagaattccgttcattctctgtatggaggggaaatgcacatgatatttcaatgcaaacttgatggccctttcttggtccagagtggttcagtgtattctttctgttttgttgcaagattgggggactcagcctgatttccttgtcttctctggctgacactacactgtcccatggatatttttcctctccttaggtttcttcagcttgctctttcttttttgcctctaaagacaaaactacacaagttccttctatgttaaggatataattacccccgctaaaaggaaataaggaaaaagggagattttttagaaagcaggaggaaggtacatagttcacaaaaagtggccaccaagatgaactatgtgctacaaaatatttctgcccccagcttaagtcctgggtgtcaagtattctaaacctattgaatctttctgactgtgttcttagaagtgatcaaggccaggtcatgaagtaaaaataacatggtaatgaatccatccctaatgtctctgaggctttccaatcaagtttactctgtccactacgtttttggtgtttaatttcctcagtatttctcaatgtctgttgtgagtatacagtttgatattgtgaggacatagtttaaaattaaaactctaaattaacaagccatttgggatccagaaaagatctggaaattctatactctgacttttgatgaaaatcatggattctgatcatcaatattaacttgagaaaattctcattttccaaatacatatgaagtaaataaaaaaggaaacgggcagagagcgctcataggctataacatttattacaagtaagaaaaacaactgttgttataaggaatacatctagcttgctcctaggaaattaatcttatttttcttttttactttccaaaagttcacagactgagtcagttggcatttatatttgtaatttagagaaagtaggtcttatcatgaaaaagagaaaattattttcctgcatttccatacttaggacagtttggatgttactttaaaatgttaaatttaaaaagtgattcaatgttctaacaaatacactcagtgtaattatatttataattttcaggaaattaaaatgtaattactgccctttagaagatattagttgctgtgctatgaaatattatctaacacttcagtggtatcagtattgatatgggcattggtgaacagtgcgggggtgatagaggagcagatgattatgagatgaagagttgacagagaagcctgtcttgtgttggatgacgtagctgggtataatgtatgtatttgcccctcaagatgcctcagggatacactaggcttctccatgatacagcaaatgaggggttaatgcctagaaacagggtcttcctaaaaccctgcacacacttggtatccaagcttattggattgagagtattttcggcaagttgacagaaactccatctcttatagctggcctgaattttcttgtgtaaaagttgagaataattattaaataaatattctagtttctcagctagtatgatttattaaatccttcagtcaagggtatgttagatgatagattaaatgactcctcaaacaccaacatgcctagcatgcagtgttgctttcaaggctctgttgagcaccctggccaaattcaataacatgtccctaattttcagatccgaggaagatttttttcagttctcatcttaactttccagagacatttgataccattgagtgctccttgttttgaaacctttcttggcattccagaagccaagttttggtctctttgctcaccaactgtcattcctgtctccttcaccagattctcttattctgttatctcctcaaatttggtgtttttcagaatctgttcttgatcttttccttttcttacaggataatggactattatctgtttccatgattttaacccattcctacacatcgatggctccccggtcattctctcttctccaggactctcttgatcaacattcctcctcaattccctattcagtcccccaaacctgaaagcttttctctacatgcctcccacattcaattagtcttcaaaaaataatacttgtttttatttctcaagtttgtactctctgctgtgtttacttctcactggagttagttcaggtcttcatctttttttatgttttagtttctttatttcaataacattcaaactcaactacattatatttgcttcttcgtctctctcctaagacatacaaagacgtgcctttgtcatcccctatattccgagtgcctaatagtatctgctacatagtaggtgttctataaatgcttactgactgaacagtacactgtatctggatgttcaccttctttggggaacattgttttacctctctccctatgcgtaagacttcagtgttattgtagcatgttctcttacctcttctttatgcctgagaattaagctcatgaccattgaagtgtcaattgtccatatgcatatcagttcagctagtgctacctaaaagcaagtttggcccgcagtgagcatcttgttgtcaatgatcagttttgaaaggttcctctgggaatctcattaatctctgttagtagggacatcttgcactgctgctttccaagaagctgccagatggctcagagaaaagcttcattatttaaaatcttttcagaggcatccagggaaaatgttgtgggcaaatattcaaacaagatcagtaagtgaagcagtggctaggggaaggatatcatttaacttacctatccccagctgatgcttacttgcttctgagcagagagaaaaagtctgatttactgactcatcacagttcctgaatggtgattgttaatccttaagagccatctccagtgagcaggctgcaaacaaatcctttaacaaaacctttaaaagatgtcttagagatgggattaaattgctaatatgatttttgttaaagactaatatacggtaaaaaagtggctctcaaatattaacaagctttggatgataaatgctcagtacaagagaggtcacaaaaagaatggacaacagtgaatgggctcatttggagaagaaagggtctagtatttgctaccctaaggttttcattgtttcttcttcagtctttaatgtggccacatcaaaagggcttgagatgttagaaagaattggaagcaagacaaattcaatttcatgaagagaagtttctaagaattttccttgtcctgggtagatcagactacaccagtaaaattcaagttcttccaaatatgcagctggattacaccagaagtcaggggctaaatgtttagggacctattttcaggggtgtgggaaagcaggaatacttgcatttctttatacttttctcaaacatatggaatcaagaccatttatcctcttaaagatgtaacctaaacttatcctaaaagctctggttgatgcattttggagcatataaatagctaaatagcttatttttaaccttgataaataggaccattctctaatatgaagcattgagggtgtaatcaatgctatttcattgtgctagatgagaggtcaggttttaatgtatacacagttttggtctgaaaggcagttttatcatgagctgaaggtagatttgggcagtgattctgaaacagattctcttgagttctcttccaggagtctgatacagatggacaagctgaccccgaggatgtgtctgtgctgtctggggtagggtggctccgtgaccatctgtgagtaattacacataatatccatacctgggaacaaggagttattttattaccagatgtgaccattaaaaagatacttttagaaaaactggtgggaagccagctagctgataaagtgatattcttttccctacaatataaaaggctttgagaaaataaattacattatcaaaaatatagtgaatggttaatacatctagtgagaattattaagaagtaatacttccaggccaggcgcggtggctcatgcctgtaatcccagcactttgggaggctgaggcgggtggatcatgaggtcaggagatcgagaccatcctggctaacacggtgaaaacctgtctctactaaaaacacaaaaaaattagccaggcgtggtggcgggcacctgtagtcccagctactcaggaggatgaggcaggagaatggcatgaacccgggaggcggagcttgcagtgagctgagatcgcaccactgcactccagcctgagtgaaagagcgagactatgtctcaaaaaaaaaaaataataataataataataataacttccttcatggaaagatagtcaagtaattcttcccaaaaaggttgacagtgaaaaaagttttcttcattctcttattccatttggatacaccagagattccattctagccatccatgggtgttcactttgtagaacatatcccaaaatagagttagttgaaacccttctgttttgccggtaattacgtagaaaaatgttagattggaaaaatgatactagaagaaggcaccatcatagttgtattgtccattttcgtactgctctgaagaaatacctgagactaggtaatttataaagaaaaagaggtttaatagactcatagttccacatggctagggtggccttacaatcgtggctgaaggtgaagaggggcaaaggcacatcttacatggtggcaggcaagatagcatatgcaggggaactgccctttattaaaccatcagatctcatgagacttattcactatcatgagaacagcatgagggtaactgtgcccatgattaaattacctcccactgggtccctcccatgacatgtagggattataggaactacaattcaagatgagatttggatggggatgtagccaaaccatatcaattatcatttttctgacaagaaaacaacctttttttttttctgtgccattggtttctgtatctttttaaagcttctctctattatctagctgaaggcatgccatgattctcctctgtctctcttatattcttggaatcattttagccatttataaccctttacattaatgatcacagaaaagcacaagaaaaacaaaaggatttggctaaaatgaaatcaccttatatttaatctgttaatggcttttttttcttccatcaatagaaacaacttgccaaaaaatcacaaatatacacagttatgggaaaatgtattcagagtacataatcataccctattatttgtctttgactgtgaaactatttaatcaagagacttgttaaatcagagattatacaagttaacataacattcatgctttgaaatttcttcaagaaagaaaagctacctttgaagccgaaatgaaataaaataattgtcttttatgtatcaaatccatcttatttaatgatcgatacatgtgtttcatattttacatgtgaatgacccacaaaaagccataaaacttatgtaagcagagtaaaaggaaattaaaagtagagaaagaatattcatagaatgaattcatatacatagaaacaagcacacagtcacacacacacacgcacacatgcgtgcacgtgctgaacatgaaaatgccaaaacgaaggagaattcatttatttaagtttaaataatagagaagccaatttaatttggcagaggcttcagtggatgttactgtggctatgctgtaaaatacttttctttttcagagtaagtgggtatatatatttgtgggtagtgttgccttttacttaagaattggttccagtatatttcagtatttgttttagaaaggtttgttttgaatctttgtttctaacaggttaaggattatttcccagacaaataattcctggtttaatgattcctggtttcctgagtgtccataaacattgccaaattctcactttactttgtgatctaacataatcaatgttaactgtccatctggatgtcttagattacttttgatttgcttgatttatttctggtttgcttgatctattttgatcaagttaaccagatagctgccaatagccatttttaatatgtgtcacagtgccacagatgtgttggggcagcaactgctggtttccccatgtcctgtttagtactttcctttgttgcatatagacaaataaaatagaagccaagaacatctggaaaccatcagtaaataacagtttggaaatttctgcttcatttggacttgtcatacttcagaaaagactattcataatataattaaatttacattttaatttcttctggaaagttcatctacttgataatctcttaaaccatttatttttaattttcattgtcatcatcccaatttagcaataactgcacttaaccctctctacctcctcaaatgtacacatctggtctccagttataataggtttcttcctaaaacttagaatggagaatcttattccctacattataagcctctaaagtcttccaatggtgtattgaaaaaatattcaagctcattagttataaattcaaaattcaccatatgctggaaactgtttgttcttacctctatctcatcttttcacaatatatagtgcagtcatatttttctatttcaccattagtgcttttcctttgcttccttcattccttccatcctcctcctcctcctcttcctcttcctccttcttattattattgttttaatttttattgatggagtattcaactttgaaatgccacctctgccactccctgctccattacaataaattgctacttccgtgggcttctgtaagcacgtgtttatactcttataatgcatttgttttaattcttgtcttatagatgatttcacgtcactttcttctgctagattgtgagtttcttgagcagagggtccacatttcattcaccatggtatctcacagcacatataataatggcctttttactaacacaataaaagttagtaaaggggaaaaagaatgaatgcatagatgactcagtgtcaccttgccataaaaagaaaaactagagttacatgaccaagatatctcaaatttaaaattacttaattgttctattgaatgacagcgttataaatacctatcaagagaaggtaattttttttttttttttaaacaggggacttattttggcaatagaaaactgagctggatggattgtggttatgatacaacatgcaaattcctatgttcttgtatatatcactattgaaatataatttcttaaatattttaatattatatgtctaacggaatccacctctgcatatgcagaggcatctgtcaggttcagatttgataagaaatgatggagagatggcattcatgtcatcagccaatatatttaggatttgagctcaagagcctaatcctaaattaaatctagggaatcccaatgaaggttttgcttagttctggcagttgtaaacacagtttagaaaaatacagttttttctttctaacagattgtggattatttcccagatgaagaattcctggtttaacgatcagttaaaacacagttccacatttgggcggcagtaggtattactaagaaaacagaaattgaaggggcatgcaagaaatgggttgtgaaagatagaaagaaaaattgtttgccttgcaatctttcttagagtttaaacaggcttttcaattggcccacctagatggaaatggattgagtccgcacttgtctagttcttatttcccaggtcaacttaactacagggaaacacactaaaagcatggattgtaatcaagaaatacaaggcagggtgtaagcctctgcacttgttgctttgctcagttgttttcatgtatctgcagctacagaattgtcttccaggattttcccatcaaattttgtagagttggggtcattaacttcattgggaggagaaaagggcttaaagtagggtgattccttgggtactagtctcccttttagtaattcccttgaatgacttgcctgggcctctagttactactgatttccattagctccagtgtttggtgatacagaaagcctcaatgaaatctttgctttcaagagtgatatgattattttcctgagctttttttttttttgagacgagtcttgctctgttgcccaggttggagtgcagtggcgcgatcttggctccctgcaacctccgcatccgggttcaagtgattcttctgcctcagcctcccaagtagctgggattacaggcacccaccaccatgcctggctaatttttgtatttttagtagagatggggtttcaccatgttgaccatgctagtctcgaactcttgacctctagtgatgtgcccacctcgacctctcaaactgctgggattataggaatgagttatgcacctggcccctctgagcttctttatggccatcagataattgtattttattttaacagtagttttatttctctgattattgaggtatttatgtcaaaaaattggacttggacactactagtatgctacacttgttgatgacacaagtgagtcttttttcagtgactacaaatgtatcatctaaaggagaatcatatccttttacttaaaaacacattctttttctttctggcatccctatgatatcctcttctttgtgagaagtcttaattctagcttcagagtgtttttattttcagtttctccctaagagcttggtttttcttatgcaaattgggactctagatttacctcaagctctatgatttcctgaactgaatgagtccagtaggttctactgtggtcttcaaaatgcctcctatgtagtaacatgttacctcaaaatgtctttactgctttctacttggcaatgtacatcttctttcaacaggagatacatggtttggatttgaggaaaggaggagtgcaaaaaagtgcaaggagagtgtacatactttccgtaactagggtcttttttcaagcagtctctgacatatttctattggttcagggtcaatcgattaatcaatcaacagattcatgaaatgtttgttgcatacctactatgtgcccaacaatatccctttccttaaagggcagaatcatgtcaggaccaatgcctaccttgttggttgatacgtcggatggtcacttaactgtgtagttcaatcttggtcccttcagaacccatgagtggaacaatggtctctattaaaacaatgtttatcttgcatcattgcggaagttgtgctgaaacactccaaatactccagtggtaaagttaagcagcattcatggctaaattccttcatccttaggccatctgccttttgcctaggtctgttgagaacctgcacattttctctcaagctttggcaactgtgtgtcttgggtgggagagaatgatagggcctcctcctccatagtcatgccaactatcaggaacctctccatagttttgtcctgtcagtttcctgttactaaaagccaggggcttatccatgtttcaggtcatgcttgtttggtgttactagcatgtctttttccgattatttactgttttccctctgtaccttgaatggctttgtgtagaactcagaaatacaacacatagtattttcttggcacctggtttcctcatcttttgcacgaaagtggctggaactgatgtgcttgtttggagttggtctctgttaaaataaatttctcagtctctgataaataaaaaattattttaccttatttccccctttaattagattctgccctaatggtttcttttttttcagaaacaattttacttttctttcaccaaagaaagtacaaacctgatgaaggaaaattcatgccttgttagtcttccaattccccttccctctccctagtctctagcacagtgacaatcacatggtggacacctgacaaacatttaccaaatgctaaccaatgggatcaatgcagagttcatctggaatttctcaccatgcagggtatttctcttagttggatggaagaatctttattttattcttactgttgattcccctgtacttggaacatatgccatttcagaactcagtggttgtattactgaatatcttttaactgtagaaatcaaagggcccttgggaataagaatttctttatgcaacagagttaggagcttgctaggaaccatcaatggttttcttgtaacttttaagaaaatgatatatttcaagaatgtggacacctggggtaactgcttaagttccttttaagaatatcaatttattattttactcaacatgactaaatgaagctgttgctcacctgaattcttccaatttattagttgagagcataaataagttgcttcaaatgccaaagtcctgggtaattttcttctcatattcactttatattaaatattcattggtgagttttttaagggtcaaaagccaaaatagttcattctgttgcacaaattatagccatatggcattttatgttcatatagaaattaaatggtaaagattcatattgatatcttgaattttgcaatttgtttttgacacaaggagggaataaatatatagaagaaaagaaaagagaaagatgtaagatatagaggagaataaatgctaacattgtattatgaatgccattttaaataacaggtatccatataaaaatgttaaatgaaacaaatttgtaagcaggtaacagaactagtggctttatagcctaaatgctgaattaagttttcattaggaaatgaatattgggttatattacattttgagaaagtcatatttttctgttagtgacagtgtataccatttttatgagaaggtaaaagttagctatttaaagaaagcaattattttgtgagcagtttggaataagtgtgaaagtggcttgtcctctcttctttctgaatcctggagatacagtgtggtattttaaacaacagcatgtagtataatgcctaagagagtactttgaggcattactatgatattaaatatagattataagcttcaatgtcctaaaggtgtatatgactttaaggcttcttaatattttaatacatgaataattattgggctcttctctttgggcctcagataataatcttactgaatgggggaaccatctttctatttgcttcatgttttaatgtagaagaatatctgttagagtaacactcctggcctctttcccacccattactcatttcaaaccatgagaagaagtatgtcctgattgacaggtgacatctgggtgcagcttctctattggatcctgggtattcactctcgtttctttctcacattgccctggaccgatattagtaaccaaagttgaataagtgcatctattctgtggtatcaaaattttctttggtggacttcctgaagaatatagtgtgtgtgtttgggggttgggtggtgggagtttgggagcagggaaggtagtaagccctttgaccacaaaactctatttacatttcttaatcagcttacaaaaataaggccactattttaatttttatctttctgtcttcgccatcttatttctcaatttgttccaaaattgacaggcaaagaaaggagtgttatatctctaattctgccaaacctcaacacttactgtaataaggaaggtgtttggggtgtaaccattcatttcatgaatgatgtatggaataatgccttaactaaagagaagaaggttttttctagaatattactccacctagactgagatgtatctgcccaatggcattattgatacttattagaagcttgagacatcattactatgcattttttgttttttaatttttttttattttaataggtttttggtgaactagtggtatttggttgcatgaataagtcctttagtggtgatttctgagattttgctacacccatcacttgagcagtgtacattgtacccaatgtgtagtctgtctttaatttttttaaattatactttaagttctgggatacatgtgcagaacgtgtaggtttgttacataggtatacacatgccatggtggtttgctacatccatcaaccggtcatctacattaggttttctcctaatgctatccctcccctagcccccaccccccaacaggccctggtgtgtgatgtttccctccatgtgtccatgtgttttcattgttcaattcccacttatgagtgagaagatgtgctgttcggttttctgttggtgtgttagtttgctgagaatgatggtttccagcttcatccatgtccctacaaaggacatgaatgcatcattttttatggctacatagtattccatgatgtgtatgtgtcacattttctttatccagtctatcactgatgggcatttgggttggttccaagtctttgctcttatgaacagtgctgcaataaacatacgtgtgcatatgtctttatagtagaatgatttataatcctttgcgtgtatacccagtaatgggattgctgggtcaaatggtatttctagttatagatgcttgaggaatcaccacactgtcttccacaatagttgaactaatttacactcccaccaacagtgtaaaagtgtttctatttctccacatcctctccagcatctgttgtttcctgactttttaatgatcgccattctaactggcatgagacgttatctcattgtggttttgtattgcatttctctaatgaccagtgatgatgacctttttttcatatgtttgttggccacatacatgtcttcttttgagaagtgtctgttcatatcctttacctactttttgatgggttgtttgtttttttcttgtaaatttgtttaagatctttgtagattctggatattaacaagttctaaaattgaggcagtaattaatagcctaccagccaaaaaaagcccaggaccagacggattcacagccaaattctaccagaggtacagagaggagctggtaccattccttctgaaatggttccaaacaatagaaaaagagcaactcctccccaacacattttatgaggccagcatcatcctgataccaaaacctggcagagacacagcaacaacaacaaaaaagaaaatttcaggccaatatttctgatgaacattgatgtgaaaatcctcaataaaatactggcaaactgaatccagcagctcatcaaaaagcttatctaccacgaacaagtcggcttcatccctgggatgcaaggctggttcaacacgtgcaaatcaagaaacgtaatccatcacataaactgaaccagtgacaaagaccacatgattatctcaatagatgcagaaaaattcaacaccccttcatgctaaaaactctcaataaactagttattgatggaatgtatctcaaaataataagagctatttatgacaaacccatatcataatgaatgggcaaaagctggaagcattccctttgaaaactggcacaagacaagaatgccctctttcaccacttctcttcaatgtagcattggaaattctggccagggcaatcaggcaagagaaagaaataaagggtattcaaataggaaaagaggaagtcaaattgtctctctttgcagatgacatgattgtatatttagaaaaccccattgtctcagcccaaaatctccttaagctgataagcaacttcagcaaagtctcaggatacaaaatcaatgtgcaaaaatcacaagcattcctatacaccaataatagacaaactgagagccaaatcatgagtgaactcccattcacaattgctacaaagaggataaaacacctaggaatccgacttacaagggatgtgaaggacctcttcaaggagaactacaaaccactgctcaaggaaataacagaggtcacaaacaaatggaaaaacatttcatgctcgtggataggaagaatcaatatcgtgaaaatgtccatactacccaaagtaatttatagattcaatgccatccccatcaagctaccattggctgttttcacagaattagaaaaaactacttcaaatttcatatggaaccaaaaaagagcccatatagccaagacaattgtaagcaaaaagaacaaagctggagccatcatactacgtgacttcaactatactacaatgtgacagtaaccaaaacaacatgatactggtaccaaaacagatatatagatcaatgaaacaaaacagaggccccagaaataacaccacatatctaccaccatctgatctttgacaaacctgacaaaaacaagcaatggggaaagaattccttatttaataaatggtgctgggaaaactggctagccatatgtagaaaactgaaactggaccccttccttaccccttatacaaaaattaactcaagatggttaaagacttaaatgtaagacctaaaaccataaaaaccctagaagaaaacctaggcaataccattcagaacataggcatggggaaagacttcatgactaaaacaccaaaagcaatggcaacaaaagccaaaattgacaaatgggatctaattaaactaaagagctcctgcacagcaaaagaaactatcatcagagtgaacaggaaacctacagagtgggagacaatttttgcaatctactatgcattttcttttcttttctttctttcttttttttttttttttttgagacagtctcactcttgtcacccaggctggagtgcaatggctcaatctcggctcactgcgagctctgccttccgagttcacgccattctcctgcctcagcctcccaagtagctgggactacaggcgcccaccaccatgcccagctaattttttgtatttttttttagtagagacggagtttcaccgtgttagccgggatggtctcgatctcctgacctcgtgatccgcccacctcagcctcccagcgtgctgggatcataggcgtgagccaccgcgcccagactgctatgcattctctaaggattctgttctaagaaatccacagacttcttactaagttgccttgttaggttactatctttcaggaaaaaaaaaaaaaaaggacctcagaaaagggactacttaggaattagtaacactattctttttatttttatgctcttctccttctcttccccttcctccttgctcagcttaagccatggagagatcaaataaatgtatgtactggggaaataggtgtagggtagattaaggtaaaatccagattaaattaatgtagtgaaaaatgacaatggcttatctacttctctgtgccagagtgagattcctccaggaagggatgccccttgtttctattttcacttctcattctggttgtcttacaatggggattttgaatccaacatgaagtctttggaaactaagcaacgttttgcaaaaccacacagatatgatgaaccaaaatgacattgataataaataacctggttagtggggaatcaagtttgttggatattaaatgcctctccaatttttagaattttttgtttgtttatttatttatttattttgagatagagtctcactctgttgcccgggctggagtgcaatggtgcggtcttggctcactgcaacctccgcctcctgggttcaaacaattctcctgcctcagcctcccaagtagctgggattacaggctcgtgccaccacatgctgctgatttttgtatttttagtggagatgggtttcactatgttggccaggctagtcttgaactcctgacctcatgatctgtctgccttggcctcctgaagtgctgcgagtacaagcgtgaaccaccatgccctgccagaatttttagtttaaatacagttttattcaaataaccaatgtcttttaactattgaaaaacgaagtaaaagaaaaaatactttttgataaagttgtctttaaaattgattttaaagtcttgaaatttgggttattttatattgtatagtataatttgaaaattattttagttaaacagtacatcaaagaggataattctttgcaaaacaaaacatctttaatcactaacaaaaggctcattaatgaatcaataaatatggaaaatgaactatgtcaggagaatagagattgccaaatgtcaaacaattttataaaaagacattaattctgaggcagtcaaaatgtactttatatatatatataaaatatataaatttaaaataatatatattatagacatatataaaatatatgtaaaacctattgtattgttcaagatagctatttgaagttgcgtttaaaaagaccagtgacaggcctggtgcagtggctcatgcctgtaatcccagcactttggaaggccaagccaggtggaacacgaggtcaggagttcaagacgagcctggccaagatggtgaaagattatgtccttttcagcaacatggaggaagctggaggccattgtcctaagcaaactaacataggaacagaaaacctaataatgcatgttctcacaagtgggagctaaacactgagtacatatggacacgtgtacttgagagtgaagggcgggaggagggagaggattgaaaaactacttatcgagtagtatgtttattacctgggtgacaaaataatctacacaccaaatccctgtgacacaaattttctatataacaaacctgcacatgtatccctgagcctaaaacaaaaatttttaaaaaagaagaaatctaactactttaaaatgttttataaagccttgcaatggctgattcctgcctatttttctacatcataccatgttattttctttcctcacacacgccacattcctggtacactagccacatttcagttcctcaaacccactctttttcttgaccttgaggcttttaattcgatgtttcttaacagtattctgccagaagtattccttctgtactatttactggaaaactccccttccttcaaggactgctgtcctcttaaatgtggtttcctcaataagaccttccatgcccatcctcatgtctccccacccctgcccactctgcaacatcccagaatctatgatacttaaattgcattattgtcagtcattaataaatacaaggaccacaagggccctcaagatgtatgttccttattagaacccaaaacaacaaaccaacagatattttaactatgaaagtccagtacagatttcaaaataattttgaataatcaaatttaatataaagagttatagtttcacaaagactatatgctatattttatcaccttaagtttctgtgagaaataggctttgttaatatgacgaaactctaaaattaatggattaaaagacacaatttctgtgaaaccccatctctacccaaaatcctcaaattagccaggcatggtggctcatgcatgtagtcctagttacttggggggctaaggcaggaggattgcttgagcccaggaggcggatattgcagtgagccgagattgcaccattgcactccaacctgggtgacacagtgagaccatctcagaaaaaaaaaaaaaaaaaaaaaaaaaaaagacattgtttcttattgtttttcaagtttctattcttttagttgaatgtacagacaaggagtgggtagataatggattcttttcatttgaatcataatgtgtcattctaggaatctcagagctaaatttaaggtcaaacataatacttatattcaccattccttcaagaaatagctgttgggcatctttcatgtgacaatgagaagttggctaagtctctgagaatcaattaatcaattcatttaatagttcaccaaattcaaaatcattattggtaattattttctaacagccctttaactataaaattgtcagcgtacacttgacactgtaatcttctaaattagaattgggcagattattgatatttgttcagctcttactacagtgccctttgtccttaattattttttgctttttatattttgttttttaaatatattctttgtttctaatttactaagataatttcaaattttatttttgttattcaggctgcaagtaggtcagtatcaacctgaaataacaagacaccctcttctttcatgtgagtcattggtaagcacagtggtggtgtgacatcagtcctgatttctatgggatggttcttggaaatgctttccagacagatttaaataattgttgtcagtttcatcatataaacctttattgctttctgcagccaactagccacactgtagtagaaacagtgtttctctgaacctggggttgcaagctccataacactttaaaggaggccatggcagaagggatcaaggtggattcagcatttcctacgtgcttttatatttatggaaccattcatgattcataacaatcttgtcagaaagttaatattcttcccatttatagatgaggaaattaatgcctgaagagattaaggaatttctcatgttgtttgcccctttagttctttatactctgccatcttgccactgtcagaaaaagcaggacatgtttttcaagattagatgtctggtactctgttcattgcagaaataacatgctttgggattacatgttaaggtgttgttggctgttttacttttttttttttttttgagatggagtctctctcgctctgtcaccaggctggagtgcagtggcgtgatctcggctcactgcaacctccgccttcggagttcaagcgattctcctgcctcagcctcccaagtagctgggaatatgcgccactgcgcccagctaatttttttgtatttttagtagagaggggatttcaccatgttggccaggatggtctcgatctcttgacctcgtgattcacctgcctcggcctcccaaagtgctgggatgacaggtgtgaatcaccgtgccaggccagatttcttaaaaagataaatggctgaggcaggcgaatcccgaggtcaagagatcgagaccatcctggccaacatggtgaaactctgtctctactaaaaatacaaaaaagttagctgggcatggtggccggcacctgtattcccagctactcaggaggctgaggcaggaaaatcacttgaacctgggaggtggaggttgcagtgagccgagatcgcgccactgcattccagcttggcaacagagcaacactcccatctcaaaaaaaaaaaaaaaagaaaaagatacatggaaggtaacaggtggagggaaaacaggttttggtaggggaatatatttgttttctattgttggcataataaattagcccaaacagtggcttaaatcaaacccatctgttatcccacagttctgtaggtcagaaatcctagttggtttgtttggggtctcttcactgggtattaccaagccaaaaaaacacgtcggccaggcgtggtggctcacgcctgtgatcccagcactttgggaggctgaggcaggtgcattacgaggtcaggagtttgagaccagcctggccagcatggtgaaaccctgtctctactaaaaatacaaaaattagctgggtgtggtggcgcatgcctgtagtcccagctacttgggaggctgaggcaggagaatggtgtgaacctggcaggcggagcttgcaatgagccaagatggcgccactgcactccagcctggggcacagagcgagactccgtatcaaaaaaaaaaaaaaaggccgggcgcggtggcgcacgcctgtaatcccagcactttgggaggccgaggtgggcggatcataaggtcaggagatcgagacgatcctggctaacacgatgaaaccccgtctctactaaaaatacaaaaaattagctgggcgtggtggcgggtgcctgtagttccagctactcgggaggcggaggcaggagaatggcgtgaacccagaaggcggagcttgcagtgagccgagatcatgccactgccctccagcccgggtgactgatgagactccatctcaaaaaagaaaaaaaaagaaaaaaaaaaaaacaaacaaacagaaaaaagatgtcaacctctggactcttaatggggggctctgggaagattccacttccaggcccattcatattgttgacagaattaagttctttgtggttgaaatgctaaggttcttttttttcttgttggctgtcagcgaaggcctgcccttagttgcaataggcccctctctgtccatgcacatgagttcctgcatctcagcagcagcaagggtgcattgaatccttctcatgcttgaactttcctttgctttcctcttctttttccagctggagaacattctctgcgtttaaggactcatgaaattggattgggcccatctggataattcagaatattctttcttatttaaggtccataaccttgattacatctgcaaagtcccttttgccacgtaatgtagcatattcttaaatttcagagattagccatggacatctttgggggaccattttgcctaccacagacagaaaagaagtggaagaaggaaaaacttttctcaatttagaagtctatttgagagagttcttgataatttttgttagatcaaatttgctgtaagtaaaagattccctctttaataattgtttatctgttttgttgaaaattgtgggtaaataaatatacagaatcttagtttagggtttttaaaagcttccatttgtggtgtaggctgattttattttgaatttttggttctaatttataacttttcaagtataattaaatgtaagttttgaaaaattttttgcttgttcatttggaatgcattttcttgattactgctaatttttggtttattgtagctttatttggattactgtagtgattaacattatggctgagtaaagagcgttggaaattctaagtatgatttctgaagatctcaaaattgaaggagcagacagcagtaatgagttacaaatggaaacttgtattttgtttggaaaatcgtttctttccttgaggaattatgttttgtattggtttcagagtgtttggtctttggagaggtacttggggttttaggaaacacagcagttgtatcttcaaattaaatgtcacttaggcctttatgccatgtttcctaaggtctttacatctggaataactttatctctattccaaagaatccaagtagttcaaggttaaacagtgtgtcatcgtgatgtcaggggtgcctcagtttcatttcttcaaaaatgttctattccatgaggtttcttttcctacttcaatagaaaaatgttgacataaattaaaagtgagcactgagttgttgttttgggaattgtccccttcttttcttcctgtattgacattaaattcatccttttttttttttttttggtctggagacaaaaatctgttatatcagttttccatctacattttgcctgagaaaaaatgtggaagacagctgttttaatgttgaaatggatccagtttctccctaagcatgtcctcagagcttttgggcatttatttttaactctgatagaattaatttggaataagacataaatgaccattatttaccctatctaatttcctgaaacaaacaatgtgtggttacttatgcctttgatttagcagtagaaatgtacgctctccagtaaatgagaataataggatcactgggtaaaatattgcatttcctaaattcctgctgtggtcatttgactggactaatattttcatcaactgataaagaatttaaaataagttattcatccatttgaatcagcaacctgtgtaatttttcaggcctgtacttgaaaacgttgtagtttaagtgccaggttgtagttggaggagagagagtgagatgtgaagaggaaaatgatgttgcattgaattccactgagggactgccaccctgggagaccagcttctgttcttgggtttcacgggtacctggacattctttgtatgactggtctgagaaagaacttacagttaaatacttctgaggagtctgcctccctcacacctcatccactctatgagtctctgaaatgcaccgtgtgtgcatgtgatcatgtgtgcacatgcctgtgttgggatgaggataggagaaaattgttctttctctgttccactcttcactttgaaaaagatgagagaagagtctgggctccagtgtaggccagaactgggtttgaatcacagctccatcccttgttaatacctgtgtgaccttcagtgaatctcagtttccatgaaatgcagacaataatgccaaggattggagataatttatgtaaagcttaccctgcacattttggtcccattgtaaccagttaataaatagtggttactgtcactatacaaaccctgatgtcactatatttagctagtgttattccatctatggaaaacatatgaatagaaacaaagtagttattttttgttattgtttaaaaaaacctgtttagagccccagcttcatgagcacagtaggctctgacgtgtaggtgctgctagaaggaactttcagagctcagctctatctttgtagtttattaatctgctaccatggaaacaggtatttaatccttatgaaacaggaaaacagctttaaacaaagaactgtttcaaacaatgtgttgttcatgggcagcgtttgtttctttttttaaaaaaatataatttctaagtgactaacctcatttttggcaatctgatttgagtttccatggaaacagaagtgacagctgaggcctccaaactcttgtaactgatggggctcaggttaagtcttgcaaatgtcagttgtcccaaggtacctaaaagagccaacagaaataagagtcggacaatgtccagggaaaaagaaggaataatacgtcaaacatttacaaaattcacaatgctgtgggtttgtgaaaaagcatgtgtaatggatagacagagagaaactcatggatgtaattcacagttaggggttatgtggcctggcctcatattaaacacctttttctgagtggctaacttacctagttcctatatatttttgttacacttagtacaagaatatagggaaagggtgaaagcttagaggattaataaaatatcacataatgggcctattaaatattagcatgagaactaaatgtaaaagaagacaaatgaaaatgtatgaaagccaaactttcaaagatagatgtgttcaattggcataggcccaaatatttatttgtaggcccccactattggtctttgtagagatttttctaattcctaatatttaacaatgatattactacatcctaggattgttggtgtaaaagtagttttcactgtttttagaaagactttccagtaattctacatcacatcagagggagaaaaatcagaatatcacctgagtttctaacacggattttaaaacaacaggcctctcttatccccaacttaagtatattgtgagtatgcacatgtttctttgtcagctacatccttctgagaagagctgtacctttcaattgttttgtgattggtgaaatcatccagtctaggccactctgaccagcagatctttgactaagttttacttgggtcctgcaggtgtttacaaattttctttataaatatctaaaggggttttcataaatgaagattttataaataaaacaaaaaggtttagttgaggactgagtttgctttgggcacgaacaatatacagtttctcaacataagcataatattgagaagtgatacccagttaaaaaagtaacctcatttttatcccatgaaaaattattttattataggaacatttcattaattattttcctgattatgaaaatattgtgtactcttttaaaaaaaattttataagctaagcaaatgaaaaataagtcacccacaatttctctatctagttagtatttacagataaagcatgcactataaaaatccccttatatatattctttttttttttttttttttttttttgagatggagtctcccttactctgtcacccaggctggagtgcagtggcaggatcttggctcactgcaacctccgcctcccaggttcatgtgattctcctgcctcctcagccttctgagtacctgggattacagccatgaaccacccactccctccaaccccccccagctaatttttgtatttttagtagagatggggtttcaccatgttggccaggctggcctcgaactcctgaccttaagtgatctgcccaccttggcttcccaaacttctgggattataggtgtgagccaccgcattcatcgcctacatatgtagtgttacataatttttgacttaaatgtaatcataatatcctttaacatacgcattcctaggtgtagacttatgtaaatttgtaacattcatcacaatatgcatactctttctaatctgctttatttctaacctcaaatatgtcataaatatcattccatgcctatagccataaaatcaatattaaatttagtaatggctttgcaataatccactgtgtggacatagtatatggcacttaacaacgtccctatttttagagcatttacatcatttaaaaaatattatttgtagatgttttgaaaaatatcctcatacatacatcttgtgaccttggtgatttcttcgggatacagttctaaaaatggtatttttctaattaggggctatgtatttaagtgttaagtaaaaattgtatactttcctcaagaattcttgtagcagttttcatcacttcctcagtacttgagacagctaaattccccatatattcacccaaactaagtcttgtcattagtttttcatctttgttaatcaggtagtcaaaacatagtatcttaattattgcttaatttgtatttcctttactacagattgaatttatttcatatattaaatgcaaatttttgtttcataatttatgaaatactagcttattttgtttgcctgtttctttggaattctttgttttgtatatatttgtgacatctctattgaggtataattgatataataaccgcacatatttaatgggtacaattagacgagtttggacataggcatatgcccataatatcatcaccaaaattaataaaatagacatgtgcaacacctcccagtttcctttatgttcctttcctgtgtgcaagtgtgtgtgtggggggggtgggggcaagaacacttaacaggagttttaccgtcttaacaaattttaagttgcacaagtctggattgttaactgtgggtactatgttgtagagcagatctttagaatttatttatctagcataaacttaagactttaatcccactgaacaataatcccccatttctccctctccacagctcttctatgattttgactattttagatacccgatgtaagtggaatcatgcagtggttatccttccgtgactggcttatttcatttagcatagtggtcttcggcgtcatctatgttgtcagttttaaggctgaataaaattccattatatgggtagaccaaatttcctttatctatttatctgtcaatggacactatatcttggctattataaataattgtaccgtgaacatgggagtgcagaaatctctttatgattctgattttaaatcctttggatccacacccagaattgggattgcgggatcatatggcagttctacttctaatttttttgagaacctccattccattttttatagctgttgcctcattctctttatataggatagatattaaccctttatgaaaatataattaaaatactttctagtttggtgtttgtcttttgtacatgactttttttaattaaaatactttctagtttggtgtttgtcttttgtacatgactttttttaatttaagacatttattttttaatatagtcataccagtctttttctttatggattttgcctttcgtatcatgtgtggaaaggctttccccagcataaatttgtatcagtagactcagattttcttctggtcttttcatttatactttaattgatttgtaatttgttttggcctaagattggaggtttgaatataactttattttcaggaaattgaatttatttactttcacattattttcttcactaatttgaagtacttatattgtcacttattggatttttaaattcttatatatggaatctgtcccttctattgataaattgtgtagttttgcaggaatatcgcaatattataacttcacaatacatcttaatatctcaataaggaaagtttctgtttattagtcttcgttgtcacaaatttccaggtgaaattgagtcatttaatgtagttccaaagaaaaattcttattcagattttgattgggattgcattaagtttatagattattttggagaaaacggatgtatctataatatagatacttcctgtccagaaacatggatattactatattttttcaactcttcttttatgtcctttagtaaaacctgtagttctcgtcccataaacttagctttttactttattgcacttttatcagactttcttcattgtatcaagagtattaatttatggacaattcctgtagccaacattgagttatctgcttctcaactccacctctcgcatgtatcactctggaatttagtatttatttacctgtttcaatttctgcaattagtagtgaatctggtaatgtctgcattaattggaagttgtcatagagtcacaaggtcatgggataatgacatttatacagcaagagaggaaaaattctagttggttttccttctttgtatgtctacttttcaattagttcctgagataacttgttctggtttgtgtatttgcaattttatggtgactacagagtgtgaattgaggaacaaaaaggaagtctcttatgacctaaaatatactttccacttgtctcccaggagaagctacattccaccattacgggtcaatttttttgggttaaggtgctctcttcaacaaaatgaaaatagctcttggggaaataaccacttaaactagccacttagctctggctgctataacaaatgaccttattctgggtagcttaaatagcaaatatttatttctcatggttctggaggctgggaggtccaagatcaaggtaccagcagattcactgtctgatgagggcctactttctggtttgaagatggtgctttcttgctgtgttttcacatgacacagcacaagccctcccactcatgagggttctaccttcatgacctaattatcttccaaaagcctcaccttctaataccatcacattggaggttaggatttcaacataggaattttggaagggcacaagtatttagatcataatgagtattgtaccccagtagtacttaatttttttattttatttttttctctgtttttattttatttattcatttttattatactttaagttctgggttacatgtgcagaaactgcagttttgttacataggtatacacatgccatggtggtttgctgcacccatcaacccgtcacctaaattaggtatttctcttaatgctatccctcccctagccccccacccctgacaggccctggtgtgtgatgttcccctccctgtgtccatgtgttctcattgttcaactcccacttatgagtgagaacatgaggtgtttggttttcggatcttgtgatggtttgctgagaatgatggtttgcagcttcatccatgtccctgcagaggacatgaactcatccttttttatgggtgcatagtattccacagcatatacatgccaccctttcttaatccagtctgtcatggacggacatttgggttggttccaagtctttgctattgtgaatagtgccacagtaaacatacgtgtgcatgtgtctttatcacagaatgatttataatcgtttgtgtatatacccagtaatgggattgctgatcaaatggtatttctagttctaggtccttgaggaatcgccacactgtcttccacaatggttgaactaatttacacttccaccaacagtgtaaaagcgttcctatttttcccagcagtactttaattaatcagattatttccatctagattgctatgtaagggcaagaccttagcattatgatatagatacatacgttttaatagtgggatggtgccgaaaataggtgcctggaagagtagaccatggtagatggccatgggtggcgagaggacatcacaaaatgacaaaattggaggaaaacatgtgtactttgagaatagagaagaaattaacaaaaagttaggagagctcagaaaagaaaagttaattttttctgtggtttgtcctgcctggttctatagaaaaattgcacaaggaatagagaaatagatggggaggaggttatagctgctttcacagtaagatctattaatttttcttcccactagcccaatctcagccaacaggaggcagggttattattcctaaaaactaagccagggacagggtttctaccacagatagaattctactgacatcagtataatcatttttagtgacatatagaaacaaatatccaggccagaattacttcttcaaaatatctttttctcagctgtaatcatcagaatattgaatacttattcaatactgcattttctaaaaaatatagccacttattctacctagtagtgtgtttggcatcattagtgatgtggtaaataaaaagaatcactttcaaactgctaccttttatgtgcagcactcacagctgccacttgaagctcagtttgaagcaatcaattggataagtcaatcaattttcattttgtcctcatctcctaggtaaccagagcatttatacagacccttgccaaggaagaacatttaaaaagtaatatatattcatgacctgttttctttgaacactgacttaatagaaaagcaaagagctacccatgcaatattttaaataacagtaacacaaattttatttgattctggtgagaaagtatgaggggaaacatactatagaatataacatcattatatttcagtctcttatgatctatcaggaatgaaaactgcaccacctgctatgtctattatgtatttaatgtgaataacaagcatcccactgctggttattaaaacaaatcataagccatctgacattatactcataacccattccctgcttcatggctctgagaaaggcacaaattgagggtggatgcattggagcagattttttgatgtgagtacaaggcatttggcctcaaagtaagtcatttatctacttcaaaaaaatcccataaaaaagtcattatgaaaatataatcataaaacagtattattggcacaacatagaggatgaaaaattccagcagttgcaaaacgcattaagttttgccttacctgaatcttcttggcatgtgaagccatgagaaaaatgaaacatttggtgtttgtagaaatgactcacattgaggaagtcatagatcttgcttgccttgttgatacaatgtggcattcaaatcccactgattgcacaggcttcaagtttagctgggccaacctcatctacctggacacagctaactggtttattggttattgtttcctgtgggaagttttttttttttttcccttttttcctttttttttattattattatactttaagttttagggtacatgtgcacaatgtgcaggttagttacatatgtatacatgtgccatgctggtgtgctgcacccattaactcgtcatttagcattaggtatatctcctaaagctatccctcccccctccccccaccccacaacagtccccagagtgtgatgttccccttcctgtgtccatgtgttctcattgttcaattcccacctatgagtgagaatatgcagtgtttggttttttgttcttgcgatagtttactgagaatgatgatttccaatttcatccatgtccctacaaaggacatgaactcaacattttttgtggctgcatagtattccatggtgtatatgtgccacattttcttaatccagtctgtcattgttggacatttgggttggttcaaagtctttgctattgtgaataatgccgcaataaacatacatgtgcatgtgtctttatagcagcatgatttataatcctttgggtatatacccagtaatgggatggctgggtcaaatggtatttctagttctagatccctgaggaatcgccacactgacttccacaatggttgaactaccctgtaaaggttcaatgccaaatgtgtctacacattggagaaaagtaatgtttgccaaatgcttactagaattgagataaggaataatttggaaataaaatagtgtaaatgggattcttagtccatgatgtactatgttataaatattcttttgctggaaactatatcctggttctggatccctgaacaagatataggcaaagactggatgcagaatactgtttgggggaagatcacttacctgcaaatcatcctggctctctttgagtccttcagtgggaacttgaagagatcactgatttcagtttgggtctcatttgtaaaataaaaagtgttgataaagaggacattaagtttcttttaaatccaaaatttcatagttttatctaataggatatgagcatcttaggagattcttcctatcctcacatatatccacatagactatattcatttaaaatgcccccaaactccagggagcacaaaattagatattactgaagaagatttatattagagttctaaaatgtgatttgactggctgtctgtagccttttcttaatatcagaataaccaaaatgtaacaaaacaaaaatgaagtaacaccatgtgtttgtatttaaatctgctcaagacaattttattttataccaacctgcaattagaatccaaccccagagattctgggaccttttcagctaatgatgagccgaccatgtttcaattaatgcaaggcttgtgaggttatttacaatccacgtaaacacattccggttttcaaaaataaattggtactacggactaaacagtatttgtcaaactcgttgattgaatgtcccatttccgaggagttaaacaagaacttggatgtaaacagttaaacatttttggaaacttcttgattcttattggtaaacataacaagagacagagcttctttgcttaacataacaagagacagagtgcagatttaaatttcacaagacctttgtctcctacagagctgtttgaggctctcctgtggtccctgctgagaagaataataatcagtatataggactttgaaaagtcctttgtcacaaggattcaggtctcctaaaactgctcatgagatgtcattgttacctatagttgattttaattttaaatatagccaaaccaaagtgtgtgtataatatattaaaatataaaaacattataatataaaataatgttctatctgtatatatatctcctctctttgcttttctctcctctgagtctctgtttctgtctttgactctctgactctgtcttcacactgtacacacacttcccaacattagctacaatgtttgggaaaaggcacagtgagaaccacagtaagtttcatttcttaaaagctgaagatattttcctgtcaattctgccatataaatcttttttatatcgttctttcctgtatagaaaatgagagagttgcctttagccaaaatactgggatgttagaatatttggttacattgttatactatatatactaacatttccactacggtttcaagtagtttaggcaattttcagtgctgaatttaagcatgttagaaatatcaattaaatacaaagttgagcattaaaactaacaatgttaaatgttcgtgttcttgaaggaataacattttttccatgtgtaaaatatttttatgttttattaatacaaaataattgtacatatttataggatacatgtaatattttgatatatacatacaatgtataataatcaaatcagtaattaggatatctgttacctaaaacatttattatttgtgttggttacaatttaaaatgactcttccagctattttgaaatatacaacaaattattattaattaaagtcaccctactgtgctattgaatactagaacttattccttctatctaatgatatgtttggacctaataaataacctctcttcaccttccaccttttttccgaggctcaagtaaccattgtctaactctctccctttatgagatcaactgtttaagctcccatctgtgagtgagaacgtttgatatttgtctgtgtgtagtttatttcatttaacataatgacccccagttctatccatgttgctacagttgacagaatttctttcttttccatggctgagtactattccattgtgtatatatatcacattttctttatccattcatcattgatggacactgggattgatttcttgtcttggcttttgtgaataatgcagcaataaatgctggggtgcaggtatatctttgatatactgatttccttttcttttgataaatacccagtagtgtgatttctgtattatacagtggtcttatttttagctttttgagaaactttcataccgttttctataatggatgtattaatttacattcccaccaacaatgtataagagttcccttttctccatattctcactagcatctattattttttgtctttttgatagtagccatgccaactatggtgagatggtatttcattgtggcttttatttgtattcctctaatgattagtgattttgagcattttttaatatacctattggccatttgtatgcatccttttgggaaatgcctattcatgtcttttgctcacttttaaatgagattatttgattttttttttttttttttggtgtggggaggtgttgagttgtttgcatttcttatatattctgaatatcaatctcttgtccaataaacagtttgtgaatatttgctcccatttaacaggttgtctctttatgctgttgtatcctttgctgtacagaggctttatagtttaatatagtaccatttgtttatttgaagtcatagccatttgcttttgaagtcatagccataaaacctttgccttaatcaatgtcatgatgcatttcccctatgttttcttttagtagttttatagtttcagatcttacatttaagcatttaatccattttcagttgatgtttgtatatggtgagagctaggggcctagtttcattcctctgcatattgatatccagttttcccagcaccagttattgaagagactgtcctttcttcagtgtatgttcttggtgcctttgttgaaaataagttggctatgaatatatggatttatttctgggttctctattattttccattggcctatatgtctgttttttataccaataccatgctgttttggttactatagctttgtaatatatttcaaagtcaggtagtgtgatgcctctagttctttttgtttagtattgctttggctatttggcatctttttgtggttccatacaaattttctatttctatgaagactatcattgatattttgatagtgattacattgaatctgtagattgctttgggcagtggtggtcattttaacaatgttaattcttccaatccatgagcatggggtgtctttccatttgtttgtgctttcaatttctttcatcagtgttttgcagttttcactgtagagatatttcacctccttgttgaaacttaccctaggtaatttatttatttatttttgtacctactgtaaatgggattgctttcttgatgtctttttttagatagtttgctattggtgtatagaaatgcttctgatttttgaacattgattttgtgtcctacaactttcttgaatttgtttatcagttctcagagtttctggtggagttgtttttttttttttttttttttttttccagacagagtttcacttctgttgcttcagcctcccgagtagccgggattacaggcatgcaccaccactcccaactaattttgtatttttagtagagacggggtttctccatgttggtcagactggtctgaaactcccgacctcaggtgatcgcttgcctcagcctccgaaagtcctgggaccacaggtgtgagccacggcgcccggccgagggtttttatttgtatataaaatcatgtcatctgcaaagagggacaattttacttcctcttttgcaatttgaacacctttaatttccttccatttcctcgtctggttaggacttctagtaccatgttgaataaaagtggtgaaagtgggcatccttgtcttgttccagttcttagtattttcatttttttcccattcagtatgatattagctgcaggtatttcatacatggcttttattattttgaggtatgttctttcttttttaaaatttaaattttaagttcagggatacatgtgcaggtttgttatatgggttaacctttgtcatgggggtttgttgtacagattatttcatcacccaggcattaagcctagtacccatttgttatttttcttgatcttctccctcctctcacccatcaccctctgataggccccagtgtctgttgttctcctctgtgtgtccctgtgttctcatcaattagctctcacttgtaagtgaggacatgtaatatttgttttctgttcctgtgctagtttgctaaggataatggcctccagtgccatcatgttcctgcaaaggacatgatctcattcttttttatggttacataatattccatggcaaatatgtaccacattttctttatccagtctatcattgatgggcatttaggttcattctatgtctttgctattgagaatagtgccacaatgaacatacgtgtgcatatgtcttcaggaaagaatgattaatattcctttgggaatatatccagtaatgggatggataggtagaatagtatttctgtttttatgtctttgaataatctccacactgttttcaacaatgattgaactagcttacactcccaccaacagtgtatgatcattcctctttctccagaacctttttctagactttccaatttgttagcatatagcttttcataatagtttctagtgatcctttgcttttctgtggtatcagttataatgtctcctttttcatttctgattttatttttttgagtcttctttctttttttcttggttagttcagctattgccttattgattttgattattttttcagaacactagcttttcattttgttaatcctttatattgtgttttaggtctctattgagttctgctctgatctttactatttgttttcttcctctaattttgggttttgttcttcttgtttatctagttccttgaggtgctttgttaaattgtttatttgaaatcttgggctctggcagtgttagttctgtgtgaaccagtcctcaggcctgcagcagcatgcttgggtacaggtggtgacagcgatgggctggggtgggctgctacttaggccttctggtggtgtgtatgtcttcagtaatggcagtagagggagcaggccaatcctcaagtcctccagcagcatgtgtggtcaccagtgcaatgtcatgctaggaggaccaattcccaggcacttgggtgggtcatgtgagagggcactggtggcagtagaggcaggcttggtgggttagtccttggggctctgggaggcatgcatgtgtgcccacaggcctgtggatggcccacacgtgtcctgatggtagtggactgagaggtctaatttccaggcccgtggaggttgtgtgtgtatgcactggcaacggtagtcagggcagcttgatttctaggcttctggatgatgtgcgtcagtgacagcagtggcagtggcaggtgggacagacctgtcctcaggcttccagatggtgtgtgtgggtgccgatggcagaaggcagggttcaaccccccaggtaatgtgtgtggtatgtgggtgccagcagtggcagttagtagattgagcctgtttgtaggtcctgggacagcacatgtaggtatgcgaggaccctgccactggagggggatggggttactggagtaggtgggtttgctgtcagtgtcagtggacccaggctctggggagcaaatactttggcttcctttgtttgtggggcaacctcgctggtgcactgtactgcccattctccaggatgtagggcactgcatgggccagagtgctagggacctgatcgcaccccttgatccagacagcgtcatgatgctgcagccctctgggtagccacagagggatgtcaccaaagctcccaagatttggaaattcagggcctgttgggacgcagggcaggatatggtctggtggggactgggctctcaaaatggtgccgtgctgtagctgcttgggtcatggcacaaacttcctctggaaaaatgtcttctcatggattccaggcaactgtctatattagtctcaggatatgtgagggccatggggctctcctgtggctaggattacaggagtctgccatgggaatgtagactgctggggcctttttgcttacattttccccaaaatggggagtgctttctcactctgagcttatgccagccaggctggctatttcactttcctctccttctgtgcttcaagcactccctgtcacttccctgctgaattccagtgttctctctcaggtgctctattcagcatgtggttatctacttgctgttttggtccttctttgtggtggaggcaagtgccagatgtctcttatcagccatcttgaagctggtctccatattcttaaatgatactaaacaacaatcccatctcttgtgcagttaggttcctgcctttgctgtcaccaccaccttaattatctctaactgtacctacatctttaggtcacttccttcatatttagagtcttgctgaagaacactggatcagtcagaactgggtttaatgcctgtggcctaactgctggagtattgagagaaggaatcagttctttcaacctctggagtaaaaagtgtagccccaaatctcatttacttttgcagacctccaggtgagatgaaagtatctcctacatctgtatttgatccattttgtattctggctaaacctactttttcaatatgatcactcaattatctcacccatgtatcctgggcttctgttgaactgaatgacttgctatttcttgtatatgttatgtggcatctgattgagtgacttttgactcatcatttatttttttttttgcaaaggctcattttacctatggtcacatgcttcccatccttgagcgtctaactcaaatgcagtcagttatattaaggttatcatgttccccaagacagaacattattctttttgataagatcaaatacctcctgttggtaaattgaagtttcaatgtaaattatagtctaaagaatagggaaaacatgaggctacagtgaaggtactcaaccaagagaggaagaaaaactaaataataatgtttctccttcagaaatctgcacctttcttaggtacttgtgaacatgctgtatccttgcctctggacttatacagcttgagggcatgaactgtgtctgattatcttggactcctctgcaggtctcagtagagtgggttaacaactgctcagtctagtgaagaaggcagccaaatatatgaagatggaaaacagtctgctaagtggcatcacataagtaagaaactcagtggggatgccaaaaaggggaatcaaatggactctccggaaaatcatctcagagggatttgacctggaaattaaaggataaatgtatttttgccaagctgccaaggtagtagaggggctaagtgtttggattttatcttgaatatgaaaaggaactttttaataataaacactcttcaacaaagactgaagtacttcatgaatttatagacctgaaggtgtttaatcagaggctggttgactatttttgcagaatttatggaagaaattcataaactctttggatgaaacctatgagaaacctgaaaattttaaatttatatgattcctatcataaaattctatgagggtaaagattaaacatgattagagaatttttattagctaaatacatattactttaaaaattaaaaccatttatttaactagtagagaaacatacattttattctgattttaaaaaaaacatgaaaaatcacttttgtcaccagaacattgaacaaataagactaccaatgataattataaagcaactttaattttatttcccacctttcttttaagttcataatatgcgattagttactctgcttctcctggagaaattctcatgttgcatttgtcttccaaataatctcttgaataactggtatgtctagatatgtggaataatcaaaactttaatcttaatataaagtcaaagctgcaatccaaaacctgtatggagggagacagggcatggccagctttccttcctcctcactttggcttctgccttttctctgtcttcttgctgtgtgtgtttctgattcctccagggacttgccaaagatgggagcaagaaaggccatactaggctagtactgctacgagccaacatcaacattccctgggcttggcagatattggaaaatgactcttttgttgtattatatggagatgggtagtagattctatgtagaccttgtgtattagttcattttcatgctgctgataaagacatacctgaaactgagaagaaaaaaaggtttagttgaacttacagctctacatggctggggatgccatgcctcagaatcatagcgggagatgaaaggcacttcttacatggtggtggcaagagaaaaatgaggaaaaagtgaaaacggaaacccctgatatgcccatcggatctcctgagactttttcactatcatgagaatagcacaggaaagaccagcctccatgattcaattatctcccccacccctccagcccctcccacaacacgtgggaattctgggagatacaattcaagttgagatttggatggggacacagccaagccgtataattccacccctggcccctccaaatctcatgtcctcacatttcaaaactaattatgccttcccaacagtcccccaaagtcttaactcatttcagcattaacttaaaagtccacagtccaaagtctcatctgagacaaggcaagtcccttccacctatgagcctatcaaatgaaaagcaagctagttacttcctagatacaatgggagtacaggtattgggtaaatagagctgttccaaatgggagaaattggccaaagcaaagtggttacagggccatgcaagtctgaaatccagtgggacagtcaaattttaaagctccaaaatgatctcctttgacttcaggtctcacacccaggtcatgctgatgcaagaggtgagttctgatggtcttgggcagctccacccctgtggcttttcagggtacagtctctctcctggctgctttcatgggctggcatttagtgtctgtggcttttccaggtgtatggtgcaagctgttggtggatctatcattttagggtctggaggactgtggccctcttctcacagctccattaggtggtgccccagtagggaacctgtgtgggagctctgaccccacatttctcttctggactgccctagcagatgttcttcatgagggctctgcccctgcagcaaacttttgcctgggcatccaggcatttccatacatcttctaaaatctagccggaggttcctaaacctcaatcctttacttctgtgcacccacaggctcaacactacatggaagctgccaaggcttggggcttccaccctctgaagccacagcccaagctctacgttggcccctttcagccatggctggagccttgaacatagagcaccatgtctctaggctgcatacagcttggggaccccgggcccagcccacaaaaccactttttcctcctaggcctccaggcctgtaatgtgaggggctgcggtgaaggtctctgacatgggctggagatgttttccccatggtattggtgattaacattaggctccttgctacttatgcaaatttctgcagccggcttgaatttctcctcaaaaaatgggtttttcattcctactgcattgtcaggctgcaaattttctgaacctttatgctgtttcccttttaaaacagaatgcttttgacagcacccaagtcacctttgaatgttttgctgcttagaaatttattctgctagatagcctaaatcatctctctcaagttcaaagttccacaaatcttcagggcagggcaaaatgccaccagtctctttgctaaaacataacaagaatcacctttgctgcagttcccagcaagttcctcatctccatctgagaccacctcagcctggaccttattgttcatatcactttccgcatttttgtcaaagccattcagcaagtctctaggaggttcctaacttttccacatttttctgtctgcttctcagctctccaaactgttccaacctctgcctgttacccagttccaaagtcacttccacagttttgggtatcttttcagcaacaccccactttactgttaccaatttactgtattagtttgtcttcacactgctaataaacacatacgtgaaactgtggaaaaaaaaaggtttaattgcattttcagttccccatggctggcgatgcctcacaatcatggtgggagatgaaaggcacttcttacgtgatggcagcaagagaaaaatgaggaagaagcaaaaacagaaacccctgataaaagccatcagatctcatgagacttattcactatcacgagaatagcatgggaaagaccagcccccatattcaattacctcccactgggtccctcccacaacacatgggaattctaggagatacaattcaagctgagatttgggtggggacacagccaaaccacatcaccttccttcagccagaaaatctctcatctgcagtttcttgacatggtttgtcagtctccagcttggtcgtgtgtgaagatgtacaccaacctctctgagccttttaaagttaattttttttaaatcatgctcaagatgaggagagaaatactcttctttctccatagtaaagaagaaataaacagctgcagcactccaacaatatttttccaaagaaattctctctcaaatatctagtttcaacttcttaaacacttaaagcgattgctaaaataagagttgcaaaattgggctttcgctgtctgtttttcaaatattgttatattttgatggtctggcaattcacttcagaacatgactgtaatcaatatttctgacttagggcctcagtcataactgaggctgagttctaatttaatagctgtttatgttaggaccatcctaactttgtagtgaaaggatgatcctttcactacaaaggtgagattccctagatgcttgctaaatgcaaagaataatgtcacaggcttgttccttgccttgcataaaatatgtaactatgataacactttaatggtgttataattgtaagatattttggagttgggagtgctcttctgcccatcttcctagtttcctgaagtcctgtatgagctttgatgacgataagttgcttaactgggccagatatctaattagctattaattgccactcctgtttgtgtctcttgttctagtaagtcacttttcttcccccacctatacttttaccatgacattgtttaaataatggaaacacattagttcttcgtctcttgtgaactttaaaaacttccttgggtcataagaaaaaaggcttacctgattttccaaaaagtgtttctccttgttccatgcaggaagggcttctttagcatccccacactggtaataaattattaaaggggtctcatatggacctgctgacagcactgtgataaatactcatattaattataaaaaataacagtggtcaaaaattcaaagttcaacatgactttcagaacagctttttctttttctttttttttcctgagataggtttcaaatttcaacactgaactttccgaaaaacagactgcaacttgatcctaaagattagtttagcacactctactttttacctttgtttttaaggagaaaaaaatggaagaagctcatcataatcatgatcatctagtgtgagatatactcagagtccaggataggccaggtaggaaaccagggactatttcaaacactgggcatgggccatcctatgtaacatgggatgtgggtgtggaaccacaggacttgaggccagagaccacagaacaactgcagggttaagatagggcagggtcaaaaaagaaagcaagaaaaagagccaaatgacttctagactatagctgaattgaaaaccagaagacattttcagttaatgagggcggagtgtatgagaacaagggtcacccatttcagggaattttgaaaacaagttgataacatgccagactttggtcttattggtcttgctgcttccatggggatgtttcctgtgagtgtgtttaaagggcccacagggctctagacaaatggtccataaggatgcctttctttttgttataaatacagtgtaatggcatgcctcatttgccagttaaaagtcataatggcttattcagatccatcatgctaaggattactcagggactgttgaatagacacatgtttctgctgccagaaaatacatttagtccccgtttacactatattacattgttatatgttgcttcttcgtgagtttttttaaaaagcctaggtaaggaagagagagaattcatgcatattacattgttacatgttgcttcttcacaagttgttaaaaaggcctaggtaaggaagagagagaattcatgccatacgttggcctcatcctctttttttttttttttttttttttaatttcccacaatcctgttaccatagtccatgtcgtcacaaaagaaaagcctaggcaaagttagtaaatataaaataggttacttttgaagaaaatatctggatatagtctattttccatgtgtagaataataaatcaatgggtaccaattttcacagtaaagctatctgaataattaaagtttagcttttctaaactgggccacatatctaatcagctgtttattgctgcccgtgtttgtgtctgttccagtaactcactttttattcacctgtacttttgtcatggtattgttcaaataagggaaaataaaactttaaaaacttcctttgggcataagaaaaaggctggaaaacaatacatcataaacataatgcatcagtttatgattctatccacttgttttatggacatgtcaagttatgtgaattaaatgattaaaacttaatactgaccctagctatttattcttctttaaaaattatatttgcaagctgctactgaagccagtgtagaaatgattcctaacagatagaatcccagtcttaaaagatgtcacaaagaactgggttctaatttccttccattttctcttagttctaacctcattataatttttatatttcaaacatacttctctctttaattttttaaaaacatttacttttaattttaaacctttttgtcacatgctggctttgaatggattccagtgagatagctgctctgagacatacgaagtatatgattcatcctgattttgaagcaggatatctccaggtggtgttgagctagttctctatgagcatatcatgagtagtttagccctcaggagtacatatctccaccttagccctagccctagcagacctcatcaagccccatagcctcatggagtggaagacgcctcctcacttccactctgagctgtttacagggatcatggaaatatggtttgatggacagagaggccttctgggaattaatgacactggtgcttgtaggatggatacactcttcacctggggacagagtccaagagcccggccgggcgctgtggctcacgcctgtaatcccagcactttgggaggccgaggcgggcggatcataaggtcaggagatcgagaccatccgggctaacacggtgaaaccccgtctctactaaaaatacaaaaaattagccgggcgaggtggcgggcgcctgtagtcccagctactcgggaggctgaggcaggagaatggcgtgaaccccggggggcggagtgtgcagtgagccgagatcgcgccactgcactccagcctgggcgacagcgagactccgtctcaaaaaaaaaaaaaacaaaaaaaaaacccaagagccctggaggcgttcaacttcactagctttatctagtttctcgtgcatttctcttttctcccttaatgttgtcaggagaattgctgctcagtacatgtcaaactttccccaagtgatggatcatatatagtgacacacctcttagtaaaaaaccttttcacttaaattaagcatttttgatatcttccacactggcagattataagacttcagaaaaataataatatattacattattttattttattaattataaaaattaatatattaatctaaaatataatattaaaaatgaaaaccaatactgactgattgctttctaagtgataggcagactgttaagcacttcacatgtattgtttcactgaataatgcgtgttcatttaacagtatattgaagggatgttaattattctataaataactcaaaatgcagatgcacaatttctttaattctgccttgtggaagtgcacacacattagtggctaagagaaacattttatttgtgtccttttttttcctgtttctttctgtctgtctctctctcttttttaaagaattgaagttagttttattcaaaagtcctactgaggactgagacctagaacccaagagcagttctgtcagatcgttccagcacagggcttcagctcactgcttagcgacctgtgttaggggttcagtatgtacaaaatcacatcacacttgctcagaagttatattaaagcagaatcacatctaggtttgggcataagaataattctcattatatattacagaggtataatcactaaccccatcagacattattttatgtgtaggaaaaggcaaaaacaagggtcattcgtctttcaaggaatatagtgactcaggcaaaagacatggaaggtcatgtgctcaggcctattttgtcttcaaagtgtttgcctttttcttagaaacaataattaataaagtaaaaatttttagtagctaaacctaagcaaaacattactggccttaaaagagtcaaatgggtaaaaattttgttttcattagtttgaggagacctgtaattatatatgttcttaattacttattgtatttattggataatgtaatagacaacactctgttgcgatcaagaataatatgtaaattggtttttagcacaaagaaggttttagcctctataagtggtgtcaaaggtctaaatcaatatgtattagcatactgtacttatactacattaaatctttctcaaggattaataaagaaagcacgtacacatcagttacaacagaaatactcttgggaaaataaagtgatgtgaatattttgcttgttgacatacctgaaatacgtacccgtggcttttaggaaatcgagcatacaatcatctgaattaaatgggaagaggtcaaatgaggacaattcaatttttacagcttatctttttgtttgtttgcttcagctcactcactcacacacacagatgcagctatgtccctgccccatggcttatatttttttctcacaaagctcatgcaaactcttacatacccatacactactttatagatatgaggtctcacacttattacttgactttgatgtcttatgtattttaaatatgtaaaacagaaatgatatcttccttgcaacattgttgcaaagattaaatgaggtaaaaaattgcaaaaaaaaaaaaacaacaacagttaaaggtcttaaacatagtagctattgttatttttatgtgtgtgatgatatcctgttaccactattgccaatgatgtgataaaactagcaacagccagtgtggtatgcttattagttgccaaatactatgctgaatgtagctttatatacctcagcccatttaatttgagtagacgatattatccccattttacagatagagaatatggacttaaatacaggtgtgtacgccatttgttaaaaaaagattcacttctgagagctcataacagagtagttaagagcctgaacgctgtggccagatcctctgggttctaaccctgggctctgccacttccttgcaccatgacttgggccagctgccaatttactctgttgtctcaatttctttatttgtgaagtaggaataatattcttacctataattcataaggctgttacaactattaaaggaggaatgtttatgaggcactctagaattgtgtctggcacatagtaagtgctataaaagtgtttgcttaataaaataaagagactttaaattacatttgactggtaggacaatttcaaaagcaatttttaatcatcttgtttaggaaatttttttcttctttttaaaatcaactcccaagcacttggaaggaatttctgtgagtttgttataacccacagatctaaaaaggtttgtgttaaagttatttggaagcaatattaggttcagaagagggcaaatgacgtgacattctcagatcataaacatcttttgtgtaagtcatgtccacataatttacttgcaagttatgttccatcccactgaggttcctccaagagcttgactatcactggttccagtttgaggagctaggccccttttgtagttaaccagaatccatatccacctagaaaacatgtagctcccgaacaatgagcacacatggacacatggggggaaacagcacacactggggcctgtgggatggaggaagggagagcatcaggcagaatagctaatggatgctgggtgatatggtttggctatgtccccacccaaatctcatcttgaattgtaactcccacaatttccacgtttcatggggggaacccacggggaagtgactgaattatgggggcgggtctttcctgtgctgttctcaagatagtgaatgagtctcacaggatctgatggtttgataaggggaaacccattttgcttggccgtcattctctctgcctgccgccatccacgcaagatgtgacttgctcctccttgccttccaccgtgattgctgaggcttccccagccacgttgaactgtgagttctccattacacctctttcctttgtaaattgcccagcctagtgtatgtctttatcagcagcatgaaaatggactgatacactgggcttaataccaagatgatgggttgataggtgcagcaaaccaccattgcacacgtacctatgtaagaaacctgcacatgcctggaacttaaaataaaagaaaaaaaaaaaagaaaaaaaaatgtagctcctttcctgatcctatcttccaccccagatggaaactaacaaagatcttctcacctatctacattactgccacttctgttgcttgtgtgtgatacctttcctccctcacaggagcattgagggacaaataaaccaaaagaagaaaacacaattatctttacactgatatttagattccttacagggacttagtgtttataagtgatgtaagtattattctaatgcaaaacattcttttcattctgatcttggagtcagagcaagtggtattttggtttaaagtgatgagattacccctagaccatctcactaagggttatctttctattgagaaatatcttttgaagagatttcatgcacatcctttgtaactcttcccagtacttaaaacttcactaccaggaaactagtggcagaattataatgttgcctccggtccactctgccacccttttgcaatttggcagcttcttgaagcacttaagcagcttggtgccttcagtctgacacttcagatgtggccatcagctaatgattcttggcttgatgttgcagatgcaactgtgagcctataaatgagtaacaaaggacttttcttttttctaatttggggttcagttgcatcattaaacgtaagtatattgtgttgatgaaatgagattgaaaaatcaaaacattcagatttctatagcaaatgtgtacttaggagaggttcaaagaatacgtgtggaattgaattttaaaaaaaactacttcaagaaaaaaagaaaaaaactaacttattatgcagttgtctgaagggccaaatgaaggcaacctggtcaggcactgcaaaacccagaagtgtcctaaatgtagaggtgggcacaggatttgttgtactcttttcaataactattttctaagagctgacaatgcaaatatgtgcatctgttatgaaaaattggcacatttcccagtgaactgttttctgtgtttatccaatatgtatttactatacattacttatgagcagacagaggaataagtacttgggatataaaactctcgtcaaactgatagtctggtatttgcactgtttttttctaaacactttgggttcaaatctgcatctattacatcttgaggttttgattaggtgcatgcattatgagtaatgttttataaatatagttgtgaagaaatacaggcatttaatgattggacacacagtctaagttacataaggcattctgtaatctcctcaaagaaccccaggaactccctaaatcgaactgctatttgttttcttcagactaaaatacagcaaataaatgaactatgtaacagaggttatattgaaaaagaaacttcctggaaggtttttcactatatggaaaatatgttatagtagcaaacataggactgaactagaatttttaagtctgcaaagtttttatatttttcatatagaaattgtcagtaaacatactttgggtcaattattgattcaggtagaatcttaatatggagtttggaacagttgaaaactgagtgagaaaacagagggatattttcttgaattttcaaggtcaaaatccatgcataaatctatgattatactatgtagctttgaataagtgcatttgttttgaacaaaacaaaacaatcatgggagttattgttttagtgaaagatgctttgctagaagtaaaatgtgttaagttgaaaaacatttactttttttttactgtggtgaatttatttaaatatttttcttcttttttttaaaaaaaagctttattgaagtatatacttgatatacagaaaagtgcacacgttgagtgtatatacatcttgatgtatttgtatgtatgcgtatacccatgataccgtcatcacaaccaagacactaaacgtttttataatctccaaaaatttctttgtttgtgtgtgtgtgtgtgtgtgtgttgtaacaatagttaacattaaatctaccctcttaacatatcataaagtgcacaatattgttaattgtgggtactatacagtagatctctagaactcgttcattttgcataaagaaattctatagctgaagaacaactctccatttccccctcccctcacaactctccatttccccttcccctcagcttctggcaaccaccattttattctctgcttctatgagtttcactgttttagagatctcatgtaagtggaatcctgcagtatttgtcctttgtggctgacttattttacttagcataatatcctctaggtttatccatatctttgcaaatggcagaatttccttctttttcaaggctgaataataaggaaacatttactatttaagtattgtaatttcccttgtgtaaattgttccaatttttgtaatgatagggacagacaaatcatatttaattttatgttactccgttggcatattggttccagataaatggctcagaattagcctcgtctagttgttctttgaaaaacttcattcaaatagataaaatgtcccagaaatacactctgattactgatgttttaaagtgggtttgtttatttcaaaaacaatattgagtttcagacatatttattttaagacaatactgggtttcagatatattcaccacaaagaattctgtgacaagtaaaagagaaaaatattggcaaactatatggtacattgattttctaatttttagtatattgaagcattgcattctcatcattcttccgtcatagacaattgagtccaaactgtacttatgatttttttcatgaatacaattccgttcagttgaatagcttagattcagtagtcatttttattcattcatatactttagcctatatagctaaaaatgtagaagttgtattatatgtgtggtgattgttactctaatcaccttaattttgaattagtactcaacacatattttttcatttttaaaggaaacgaaaaataaaacaaagaaatacactttcttttctgaaagtacaaacccaggagttgaagaatggttaatatatgcctagtgagcacagttaattgggctataaaatagaagttacacaaagcacattttatttagataatgttatatataatttaattatatagtaaagcataaaatgaggataatgttaaaaagaatctataatttaagactccacattttctcttaatgctatacaacctaattgaaattaacaatacattgaaattgttgactgacttgcttttcaaaagaataacatttggttggcaggccaaggcgggaggatcacaaggtcaggaaatcgagaacaccctggctaacatggtgaaaccccgtctctaataaaaatacaaaaaattagccgggcgtggtggtaggtgcctgtagtcccagctactcgggaggctgagacaggagaatggcgtgaacctgggaagcggagcttgcagtgagctgagatcgagccactgcactccagcctgggcgacagagccagactccgtctcaaaaaaaaaaaaataacatttgggtatcaatcaggaaggctggagatatggacacagggcaaataaagccaaacagacacagagatatgatttacactgttttgaaatcactgccatgttcaaattttcatatggccaacttctgctcataattagaattattaaaaagaaaactggttcaatcgagaccatcctggctaacagggtgaaaccccgtctctactaaaatacaaaaaaaaaaaaaaaaaaaaaaaaaaaaaattagccgggcgtggtggcgggccctgtagtcccagctacccaggaggctgagacaggagaatggcgggaacccgggaggtggagcttgcagtgagccgagatcgcgccactggactccagcctgggcgacagagcaagactcccgtctcaaaaaaaaaaaaaaaaaaaaaaaaagaagaaaaaggaaaaaaaaagaaaactggttcaactcaggaaagtctcctggtgggtcaaatgttagcaaatgactggagaagtttcacctggctgtgaagatctgtagccagaactcttgacaaattatcacagcaacttacttgcggctttatctgtgtcccatgtttaaacacttcataatagtctcattgatcttttcacaaaatcccagccttctacatcctcttttacaaatttgttttatttaatcagggacccacttttccacaagtgtggtttgcttgtgctgttctttgtcttcctcatgtaaggttttataaaataatgcaacttattcatgggttataactagaaaaaaaatgtggcattcaaatcccagcttttgtgagagacaaaaacaaaccacttaaaaacaaacttgagtttttaggaaagtctgaaatttctgcaattttccaatgattccatttaagctttttagcattgcattatgaaagatccatcaagttttgacacagctttgtttgtttaagcaaggtaaaatgtaaaacataacaattttgttaagctttcaggaaggaagtttctcccttgacagtataagaaaagtattaacaaggaccactttctaatactcttagaagacattcttacttctgaatatttactcaaatgtttcaacaatggggttttttgaagttggttgaattttttgtgtggcaaatatttaaatggtcccgattccctatgtatgctgtatgtaatactaccattttcctatttactctgtactggggcaagtgtatggtagtaaggatatgtagatgggtagaaacacactattatatgtctttgtccaaatatttaatgtttgtattaaatattaataaagtgttaaatatcagagtttttggctaataacttagctgagaaaaaagtcgaacattactttcagttgcccccatttttttaaaggaataagtacacataaatagtttgttgtaatcagtgctatggtctgagtagacagcaaggcaagaaaagatcagtgcatgggagataaatgagtattttaaagcaaaatctgaagcttgggttttgaagatgcagtgataaaaagggatattttcttcctttgttttttaggggaaagaatataaagtataacttggcataaatattattttctcttattgaaaatgtcatcctctctataacaaaaagagaggaaatgtttgtctcaaatagttgtaagttcactacagctcttgctgaagggcaatatttttatttttaagggccccactgttttcattctctcaagctgaagtttagtccttagcactacagttttgctatgaataaatcatctactttcttagtgtgtgtcagaaagttttaaagctcaggtaataataaaaggttatttttcttctttcttttgaactgttgatagtggccaaagacaatgacactttggtgaagcagatttgccaagagagactttgcagactccacagatgttgtgtactgcagagtattctgttctgcaaaatcattctacagggcttcttagggatttcctgtttctttttcagagaagactacaaatcaacttagttcattcaacaaatactgagtgcctactatgtgcaggacattgttctatgtgcatctttaatattctgtttttaagtgaaagtgatgtcttttaatctgacaagcccatttaactatttgaagtttatgcatgttgcatcccctctgttttgacatgtgaagacttaaaggacactgacatgaatgaggattggtggatgggcatttgaaggctgatggtgtgagtgtttgggcattcagccagtggcattatgatcttcccagacaacaaaactaaatgacatggtgatttctgctcccttgctctcatttgtcatcacaatcattcttcctttaatacataattgtcctctgtctttacttttaagttctactgacaatctctatgtcaggcctttcttttgtccttagattattgcaagagcctctgactttgtctgaatggtaatctagattaatatttccaatgcattcctatgagtctgcccgttgccagctgaaaaatggtaaagaataatcttaaagcactccaaattgctactattaatgtatatagaagtataaaataactggaatcttccagcagatagttggacatgtgagtaaatggaggcccaagaagcttaagtgattaagttcgggtttattaattattaggaagaaatattggaacgaaaacagagttctattaagtttcaggtctgtgtactctctcttcttacaaaatatcttgcattaaatttagtgttttcttccaccatgtaagacctcccaagatcagggattatgaagaagaaggattatgtttcccagaagaaacagaagagaattcgtgaacatggtcaccatgctgaaatatatggtgaaaatacaaatgtaaaagaaaatagttcaattatgctggtgtatctgttgtttaatcttaattacatataaaatatggctggagtggtattgctgtcgttcagtaaatggataaataaatgcgtaaaaaaatagtatgtagaacatgatatttagcataaaattttagtgtaaaatcttgttggaagttctggtaattatctcaaggattagaaactatctggatcataaacataccagtaactacgtgggaatctgattggcttttaaaatttttgttttaaaattttattatttgtttaatttttccaattacttgcccagataggtaacttgattaataatgcactctctattgactcattttcattttgtatctcatgttctcactctcttaccagtgtttattggggtcacctctcaaataaacttttcactcaaatctgtgtttcagtttcttctctgggagaacccaaaataagacaattttttttttctaggatacaactttatctctagttgtctgcccgtggtcattcaaaaggaggtctaatgctcatctctaggaatttcccaattgtacagtgctgccatttggtcatatatccctgtaactgcttcaacttctctctgtctcagggacttggtccttccatcttaggttcttgccaaaattaggggtaatctctgcctactttgatgaaatttttaagacaataagttttagaggctgaaggagtattattttgttttctttattgtgtacccaagacaatgataagtgatagacaaatattacagatcattgattttctgctgctgctgctttttttttttttttttgagacagagtcttgctctgttgcccaggctggagtgcagtggtgtgatctcggttcactgcaacctctgccgcctgggttcaagcaattctcctctctcagcctcctgagtagctgggactacaggcgtgtgccaccacacctggctaatttttgtatttttagtagagatggggtttcaccatattggtcaggctggtctcgaactcctgacctcaggtgatccacccacctcagcctcccaaagtgctgggattaccggcgtgagccaccgcgcctggctattttctgcttcttctgataagactgttaggaccacttactagcactggatcttcatttagttggcttttggggatggatatgaagggatttgtagaaaacacacatccaggctttgtgggcacaagctgataggttactacttcaagctggtaggttactcccttcaaagaagggaggtatcagtgttgagggtgacagagtcatgtggaagagagcaaaggaaaccacatgtagggaatgctaatggttggttcaacaggagattgtatatcaaagacatggaattaacttaggtgcccatcaatggtggaatggataaagaaaatgtggtacatatataccatggaatactacacagccattaaaaaggatgaaatcatgtccttcacagcaacatggatgaagctggaggccacagtcctaagtgaattaatgcaggaacagaaaatgaaataccacacattctcacttataagtggtagctaaatattgagcacacatgcacataaactggaaacaatagatactatggactactacacagaagggagatgatatagtttggatatttgtccctacccaaatctcatgttgaattgtaatccccagtgctggaagtggggcctggtggaggtctttgggtcatcagggtggatccttcatggcttggtgctgtccttgcaatagtgagtaagctctcacaagatctggtcattttgaagcagtggcaccttcacctctactctctctcgttcctgctcttgccatatgatgtgcttactcctgctttgtcttctgccatgaataaaagcttcctgaggtctcttcagaaggcgagcagaggctaatttcatgcctcctgtaagtcctgtagaactatgtgccaattaaaccacttttctttataaattgccaaggctgaggtatttctttataacagtgcaaaaatggcctaatacagaaaattggtacacagagtgggatgttgctataaagatacctgaaaatatggaaacaactttggaactgggtaatgggcagatgttggaagagttcggaaggcttagaagacaggcatatgaggagaagtttgaaacttcttagagactggttaaatcgttgtatacaaaatgctgatagtgacatggacaatgaagtccagtctgatgagatctcagatggtgatatggtttggctctgtgtccccacccaaatctcccattgatttatgatctttagtgttggaggaggggtctgatgggaggtgattggatcatgggggtggatttcccccttgctgttcccatgatagtgagtgagttctcaggagatctggttgtttaaaagtgtgtagcacttccccctttgccttctctctctcctgtcactgtgtgaagatgtgcttgcttcctctttgccttccaccatgatcgtaggttttctgaggcctccccagccatgcttcctatatagcttgtgggactgtgagtcaattagacctcttgtcttcataaattagccagtctcaggtagttctttatagcagtgcaagaatggactaataccgagaattggtaccagagaagtggggcattgctataaagatccctgaaaatggggaagtgaccttggaattggataatgggcagagggttgaacaacttgagggctcagaagaagacaggaaaatgagggaaagtttggaatgtcctggagactcattgaatggttgtgaccaaaatgatgatagtgatatggacagtgaagttccagctgaaaaggactcagatggagataaggaagttactgggaactggagcaaagatcatgttgctatgctttagcaaggagactggcagcattgtgcccctggtctaagtatctgtggagctttgaacttgagagagatgatttagggtatcttgtggaagaaatttctaagcagcaaagcttagaaatgatgtggcccagctgcttctaaaacatatgctcgtttgcataaacaaaggaatgacctgaaactagaactcatatttaaaagggaagcagagcgtagaagtttggaaaatttgcagcctgactatggtaggaaagaaaaacccatctttctggggaggaatcaaggctgcagaaatttgcataagtaaagaacagccgaatattattggccaagacaatggggaaaatccctccagggcatttaagagaccttcatggcagcccatcctgtaacaggcctggaggcctaggagggaaaaatagttttgtgggccagatccagggccttgctgctctgtgcagccctgggacatggcaccctgcatcctagctgcttcagctatggccatggctaaaaggggccaaggtggagctcaggctgttactttagaggatgcaagccgcaagccttggtggcttccatgtggtattggtcctgtgggtgcgaagaaggcaagagttgaagcttggaagcctccacctagatttcagaggatatatgaaaatgccttgatgtccaggcagaagaaaaaaagaatggtttcatgggccaggaccaggcccaagcccaggcgcatgaccttgctaccctacaaagcctcaggacactgctacctgcaggggtagagccctcatggaggacctgtacttgggcagtgcagaggggaaatgtgaggttgtagtccccacatagagttttcactgggacactgcctagtggacctatgaaaagagggccaccattcttcagaacccaggatggtagatccactgacagcttgcactgtgcacttcaaaaagctgcaggtactctatgccagcccatgaaagcagccaagggatctgtaccctgcagagccacagaggcagagctgcccaagaccttggaaacccaccacttgcatcagtgtggcttggatgtgagtcatggaggtcaaaggagattattttggagctttaagatttaatgagtgccctggcagattttggacttgcatggggcctgcggccccattgttttggccaatttatcccatttggaagaggagcatttacttaatgtctgtatccccattgtatcttggaagtaactaacttgcttttgattttacaggctcgtagttggaagggacttgtcttgtctcagatgagactttgcaattggacttttgagttaatgctgaaatgagttaagactttgcgggattgttggaaaggcatgattgtgttttgaaatgtgagaaggccatgagatttggaagggggcaggggtggagtgatatggtttggctctgtgtccctactcaaatctcatgttgaattatgatcttctgtgttggaggtggggcctcgtgggaggtaagttgatcatgggggtggattttctccttgctgttcttgtgatagtgagggagttttcacattggttgtttaaaagtgtgtagcacttcctttgctctttctcctttcaccatgtgaagatgtgcttgcttcccctttgccttccagccactctggcttcagccttggctcaaagaaccccagagacatctcaggctgacgcttcagagggcatgagccataagccttggtggcttctgtgtggtgttaagcctgtaagcatgcagattgcaagagtgagtgaggcttggcagtctcatagatttcagaggacgtatgaaaagcctaggttttcaggcggaagcttgttgcagaggcagagccctcacagagaatctttactaggacaatgcagaggggaaatgtggggttggaggccccacacagtgtgcccactgggccactccctagtggagctgtgggaagggggctgccaccttccagaacccagaatgatagatctactcacagcttgcaccctgcacctagaaaattcacaggcactcaacaacctatgggagaagctgtggagcctgaacactgcaacgccagagcggtattgctgctcaaggccttgggagcctaccccttgcaccactgtgccctggatgtgggacatggagtcaaaggagattaccttggagctttgtgatttaatggctgccctgctgggtttcaagcttgcacataggcccctttctgttggctgatttctcccttttggaacagcaatgtttatgcagtgcctgtacccacactgtatcttggaagtaactaacttgttttttattttacaggcttatgggtggaaagtacttgccttgtctcagatgagacttgagactttggactttgaacttttgggttaatacttgaatgagttaagactttgggggactattgggaaggtatgattatattttgcagtgtgagaaggatatgatttttgggagaggtcaagggtggaattatatagtatggatatttgtctctgctcaaatctcatgttgaattgtaatccccaatgctggaggtggggcctagtgggaggtatttgggtcatgggggtgaatccctcatggcttggtgctgtctttgcaacagtgagtgagttctcacaaaatctggtcatttagaagtgtgtggcaccttcacccccactctctcttgctcctgcttttgccatatgacatgcttactcttgctttgtcttctgccgtgagtaaaagcttcctgaggtctccccataagctgagcaaatgctggaactgagtttcctgcacagcctgcagaactgtgagccaattaaacctattttctttataaattacccagtttcaggtgtttctttatggtaacaggagaatggcctaatacgggagtgtgggagagggtgtggattgaaaaactgccattaaaagtaatgggaaaagccccaattatttttgcaccagcctacagtcctacacgtgtgctccttgtatctaaaataaaaactgaagtttataaagcggggaattgcagttatgccaaatactctcagatttcctggaagagtcaacgaataggcacacaccttgcttggttgatctattattgcaaccttctaataccctccatgacttgattattatctgcctgtccagtcctaattacaccacttgttaagttcatgacttagaaaaatctactgagctatttcacatgttagtaatcttatgtaaacaataaagataaaaatgattatttgtagagtttttgtgagaatgatataatctgtgctcaagttcttaaccatgcttgctacatattaagatatcaaaaatgctagttattatcactattattttaagctatttctttctagctaatgttcaaaacaagaataaaagcaggtattcttggatgttacttgaaattagtattgtgtgctatggaaagacctatatagagaatgcaaagttaatattacaaaaattttaaatctgtcttttaaggatagtggggaggaagtgaggatggttaatggatttgaaaacatagatagaatgaataagatctaatatttgatagcacaatagagagataatattaaaaataatttatttgtacattttaaaataattaagagtataattcagttgtttgtaatacaaagaaaggataaatgcttaagatgatgagtacctccatttaccctgatgtgattattatacattgtatgcctgtatcaaaatatctcatgtacctcataattatatataactactatatatccacaaatttaaaaaaaactttaaaatttccttttacatctttaaaatatctttgttttttaaaaaataattttagtgatgtattaactaatttttctctagtaacaaacaatctctgacttacaaacaagagttcatctcttacgcacattacatgtatggggcagctgtagcctgtcctccatatgtctcctgccatatcacactgaggaatcagcccgtatgtggacctacccattcttgatcagaagaaaagcaatagagcagggagaagctcataagactctaaaagcttctgcttggatacggtgtgtgtcacatttacccacattctattgaccaaaacatgtcacatggctaagcccaaactccgtgagtccagggactcttctctttctctactggaaggactggcaggtcatatggaaatagatggcattgaatgatccttttaagggaaggatgatagtgaataattacaaagaattacatgatatgaagcaaatggacttcaaaggtactttttggttttgcccaaattttctattttccccgaagaaccagttttgaaattgtttagttggctcagacaattactcatttgaagtttcacagagaatttaagagaaaactgtgggttgctggccatctagggcatcaatctgcatcagtttaattaaattaatatgaaaaattgtagtctaagtcaaggaaattgaggaggtaaaaagatacctgtaaaatgactgaaagctgcaagcacatgtcaaattatttgttttgaagtcatttcaaattgcagtggtaccttcatatattaagcatagtctatttgaaccactatatttaattgctatccatcatttacaccaagtaatatgtggtaaggctgaattcctcctttttcttttggcctaattttgagagatgaaaacaatttaatctctcaaaataaatttacaccttttattctttaaacccttcagttcttcttcgcatagaaaacactggtttcctcttcagtttcagttgcctcattttactgcatttgttatagactgaatgtttgggtctctacaaaatatagatgttgaggtcctaacccctagctatatttggagatggggcctctaaggaaataattaatgtttaaataaggtcataagggtaaggccctgatctgaaagaatcatgtctttataagataagatggctgggcatggtggcacatacctgtaatcccagcattttgggaggctgagatgggaggatcacttgagtccaagagttcaagaccagcctggcaagatagcaagacccccttctctctatatttatatgatgagacaccagagagcttgctttctctttctttttgcattaggatggagaattatagagaactgtttggatctgtccgttttgaaatactgacttctccactatagacccctagttgaatattaagtgattggctagagatatatatttggaagttgtcagcataaaagagcctgttaataccatggccttggatgacattggttaggtctgactacttagggaagagttctgaacccagagatactctgaaatgtagaagtcagccacaggaggaagttccagtaaatgagaccaagaagcagcagccagggtagtaaagggaaaataagcgtgtgtaattcttgaggctaagtgacaatcaagagagctctcatcctggtttcagtaacccagacatatgcatcgtaatttgagctttactgcccccatactcctgattatgtattttctgattccaactctagtctaccttgtccagcaaacagtttccttccagactgagaaaaggtaacatggggcttgttcttctttccccactggagtgaagtagactagttcaccttagctcaaaggacttcagattctggattgtatgttaataaatcatctacatatttcttcactttgatcatcagcgatatcaactaaaagtatcttaatatatattttatatagcttagctgagtgagtaaatatgtagatttcagagtgacagtattaataaccacagtgataattaaaaatgtttagatgttgtatagtaagtctgtgtttttcctaccacctcatagtggagaacataaaaacagcccttcatgagtggaaaaagggtaggagaatgtatgatattggaggaaaagagaacccaagtcattccccacaaaggaatttgtgttcctaaaacatcactgcaagagtgttattatctgaatatttgtgtcctctccaccttaaattcatatgttgaaaaggtaactcctaacatgatgttacttagaggtgaggcctttgggaggcaattaggtttaggggaggtcatgagggtgaagcccccgccaccaatgccccaggaaattagtgctattataagaagtgataccagagagcttgcttctctcaggatcactgtattattttcctgggactgctgtaacaaatcatcacaaacttgagggtgttaaacagcagacacttattcactcacatttttacaggctagaatctaaaatcatggtgtcagctgggttgtgctttcttcaaagggtccgggaaagatttcctcccttgaatctttcggcttctgctagctacaggctttccttggcctgtggttgcatcactccagtatctgcctccatggccacattgcctcctcttctgtctcatattttcttgtctttctcatataagaatatttttctttggatataggacacacttggataatccagaatgatttcatcttgagattcttgatttaattacatctgcaaatgggacaagttttcaaataagataacattcacaggctccaggcatttgatgtaaatatctttgaggggctatttttttggtctgctacatttcctctttgagatttgggtatctcgaaattaatcaataggaaggttttaaggagaaaaataggcattagggagtctaattttccattcccccagccacaagtgtctagttacttttgagtagttagattggttgacttttccaagaaatccttcatgcccattatttcactcttattcctttattcttttgtcatgggaatgcttttctaaactcaattcaacatgcagttaactcatacagagaaactcctagatgttgtgtattgttctaaactccaatgagcattatcttgtttagtcttcacaataaacagagacacttagaggttacttgctcaagttcctttggaacccaatctcttgattccaactttaatgctttctccactcctcttaagagataagcatgaaagggcaagttttgggaaggagaaaggcaggcacatgttaagctggtaacggctgttgcctaaatgcctaatgaaagatttcataggaatgatctcatagttatatgagagcaagaatgggtcatggccagcactggagtgtctgtctaagaacacttaaaggagagataacccacctacttcactagtgtccttgggtttggcctatgtcaggatacaggtgggtctgattgcttagctgtagcaactggctgacactagctggggataagggggtggggactggctcactacaaagagattccccagctggagctgctctcaaggggaggtggtgtgggggcttagctgctgtgaaaaactgggtggccagttggttgtggtatgagccagactgagagggatgttatttacgggagccagttccagctggtagtcatacaggatgaggccaccctgcagagatggtagcaggcaggggtgggaaaagcgtgggccagggaccagtgctgagcttgggtaacaaaaaggatgtcgcgaacccaatcaggaatgaagggcaactgagtgtcaaatgtgtggagttgttggctgtgcatctgggtccactcttgttggtaaagaggagcctggctggggcaggcacggtgcctcatactgttctgagtttgtcccctggattatctttggcacaaatgctttaatttgttttctccccttaaccaattacattggtaggaaagtcataggcaggttttatagcagtatttaccctttaccctgtatatgaccttaatatttttgatctacaaaatgtaaatatttttacattccacctctctttctcatacagaaaatgtgaggatcaataaaacagtatacatatggctttcctggaaagaattgctatggaatataaacgcttcttggaaaggagatgaaacggcacagagtatctgattctcaaagcatgcaaaactagtgattagttatggtaaaagagaaggcaagagacagtccccctatgagaataactttggttgacttacactgtttttacaatgtatttgtttactgtgttgaaattattggccagagattctgacatgagtgttttttatttcctgcatctccaactaaaactcctcatttctttttcttttttaaaaattttttgctgcaaggacaaaaaaatgctccccatttcttttttaattaacttagttgctaacgaggagattcaaaacctaaatgtttagaatatattttggaaatccttctaaccatgataataaagacgaggtctcacttgtttgcctatacactactggtatcctattctttctttgattttgaatgttatatcctggtatagatagacccgtgggcataacagtgatggagaaaaggtagggcagggcgcaagtcctgaactttgacctagaaattcagatgaaataaaaattctaaactggtttatttaggatcatatacatatgaaaacataaaaaatgggtataatgaaatttctgcctgattcgtgagcaaatccaaggatgttctcaagtgggagcattttgcttctttgctttcctgcctgactgaaaagaggaagttctgaagatgggaagtctatggatggcacttttctggaactggcagggtgtacctgacatagtgggaaggagggtaaagagtagtggccaaatccactgaatcaatccttacctcattctttgatgatatcatgaagcatttcgccagtctttagaagtcctgttgtattgagtatcatcctcctagaaaagtccacgcagaactgtaatgccatgggagtttatttggctaatccatagaggatggtggagttgcattctcttatcagaaatataccttctgcactcccaccactcatcgacccagagaattttatattattaaatagaatacaagccagaactatttgcatttacattacttaattaatgtcgagcaatcacaagaactgtgactatatcttgggacttatacctgcttgacctagcctgcacaccaaagtgataccttccagaaccaaaagaacaaaataatttatgtttcaatagttacagaaaaaagtgattctcagtttttaaggagctgtgttgttcttgattctgctaatcaggttcagaagtactgagttttagattcaaaacacctagcaataaatttaaaaaaaccaaagatttaaaagtagacatttatgtttcttctaaaaaattatcaaataaaatgctaaaatatcagacagtctgtgtcactactggtcacttggctagcttaaccttatatattaaacacattaaacaatgttagtggtataaaacatatgcatacattgtcatattttgctctatgattattaagaaaaatagaatgatagaggaaaataattgatgtggtagagtctttatgaaaatatttctttttcttccaaagcccctctggctatcatcttatttttatagaaatggcaggtatccatattttacaataattttctcagagatggaagtaaatctatgtccctctacttcttcgttcggtttcaatacatatttcatagcattcttaattttcaagatatgacataatttatttttttatttttagttatttttgttgcgttaattggcatattagattgctagggctgccgtaacaaaatacccccagactggatgtctttaacaacagaaatttagtttctcacagatcggggagctagaaggctgcgatcaaagtgtaggcacgttgatttgattctgaggctttaactctttgactcgaatatggctgccttctcccttcatcttccacggtctttcctcagtctcagtgtgtgtgtgtctgtgtccaaatttcctgttcttataaggacccgagtcatattggactagggcctaccctacagacctcattgtaacttaaatacctctttaaataccttatcttcaaatgctgttacattctgacatactggggattgggacttcaacatataaattttgggtgacacgattcagcccctaacaattggtttatttccagccactgtaatataggtttggtgaggtaaaggatttttgtctattttgatatactaagcacctatatcagttcctgggacataatagacatgaaattagtatttgctgaatgaatagataaatgaatcggtcaatggataaaaccagtaagttgagtgacaaatacgtcaacctcagagctctctacatctaacagatgccacatttgctactaaagatcatttgaacttgaattagtaagatttgaacagccttagttctgcttaggcatatcagtaacatttgtgggtaaagcctgtaattagaaataagtaccaaataaaatgcattaataatttcaaaatgaagaataaaaagcacatcaactgtggaggagaaacagaacagtaggggttcgacaagcttggatcactttaaggacaaagatttgtaattaaaaatgaagtgaatttaatctttgctgctaatcactcctgcactgttagcctgttttcatcaaactaattgatggcatatggaacagatgcatggtgagattacagctccactttatgggagagttataacaaatgtgactttccctctattacatgcattaacattcagaaaatgcactcctttgctttcttcacatgccaaaattggttcttttgtgcaaagctgattaaaaggaatcaaaagatgtttaatacacatgcaatccatttgattatcctaagtcgtttctggaatgctatgtgcactgtaatgtggagggcgcacattcttaacttcaactccacatgaaagtttgtagacaaaggttaaacacaatctttacttttttttgacatatttcaaaattcatttttgaaggatgtgatagttaaagttttataaaatttgcgtcttctgtttttagaaagataatttaagaaagaagcaagtaatacctttaaatttatctgtccaggctgggcgcagtggctcatgtctgtgatcctagtgctttgggaggcagaagtgggtcgattgctgaaagccaggagtttgaaaccagcctggacaacatagtgagacccctattactatgaaaaaaaaattagctgagtgtggtggcacatgcctctcattctagctacttgggaggctgaggtggaaggatcacttaaggccaggaatttgaggctgcagtgagccatgatggtgccactgtacgccagcctctgtgacagagtaagaccctgtctctaaaaagcaatcgtaacaataaataaaaaaaactctccagaaataacatgtcctttcattagttttttaatagcaattattaaactaaataggtatggatctaaataattctcttctaattatagattttgaagtcattgaaggaaagcaaaatacaaattattaatgatgataatattgctctgtagttacacagaagaatcacatgtgaatgacttaaactttggcatgattcatgtatgttagatttaacgtaggtaatgagcatttcaccttgaaatgagtgctaggaaacaggaacttaggtaaagtgcgatgccttttaatattaagcacttctctgttctttttagcttgcttctcaattttgtaccttgctgtgacccccagagtgatttcagtttgctatagactgaatgcttgtatcccttctcaaattcatatgttgaaattctaacgcataacgtggtggtactaagaggtggggcttttgggaggtaattagatcatgagaggagagccctcatgaatgggcttagtgccctgataaagcaatacaagagagcttgcttcctctctctgttctctaccaaaggagaatacaacaagaagatgcccatctgtagaccaggaggtggtccctccccagaaactggatgggccagcacgttgattctgaacttctagcctccagaactgtaagaaataaatttctattgtttaagccacctggtcatgacatactgttataggagctcaaactgactaagacacagttcctttaaacagtatcaatacaaatacaacaatgaaagaaacctcatatttcagtgtgaatttaaatgtcatctctttgttgggaatttttttgaacaagtaaattagctatctctgttattccttatcacagcaccttattatttcctttagctcttcctcccctcccctcccctcccctccccttccccttccccttttccttttctttttctttttccttttccccttccttccttccttccttccttccttccttccttccttccttccttccttcctctctgtttctttcttctatctgtgtaacttattatctatttttacaggtaagtttcataagatcaagaactagacttgttttggttgggcacggtggctcacgcctgtaatcccagcactttgggaggccaaggtgggtagatcacctgaggtcaggagttcaagaccagcctgaccaaacatggtgaaaccccatctctactaaaaatacaaaaaattagctgggcgtggtggcaggtgcttgtaatcccagctatttgggaggctgaggcagaagaatctgttgaacctgggaggcggaggttgcaatgaaccaagatcctgtcactgcactccagcctgggcaacaagagcaaaactccatctaaaaaaaaaaaaaaaaaaaaaaaagaactagtcttgttaactactttatctccagtggctggacagttactactgcataatatacatccagcaaatatttgttgaatattgttgaataagtgatttcaaagtcacttatttagcccagcctggttcatagacagatatatgttttgtcagttaaggtaaataatagctggcatacctattttcaatgataaaaatgaaagtagattttataaattcattgtctctttttattccctgaacatggtctggtttagaattgcacatgaaaaattatgaagtgagcttagcatctcatgttacccattatgctttctctttctcaccttctttaatttcttagagttcttatggcctctttaatttttttctaatcaaagaaaatgaggtgagaagtcactttcacttgggtgcggatgaaccaatatcatctctcctaaagcaatagatctatttataggaatctcagctttaaatagcatgagtgataataattcataaatcagtcagactctaggcaatgtgttaaacatatatattgatgtgggggatgtacaaattcctactttaatttatggcattagaatcacaccttgcttgcaggcagacattttggccacatgtctgacattgtttgaatatattatgaagccagattaaacaatccttgtgtatattttaaattttttagaaacagaagaatgaaatgagtttcactgaagatagatgtgttatgaaaacataaacattttgaaactttgatcaaaatagtaatctttacttgtttttatgtgcaaaaaggcaacaatttaggaaactttgtatatatttaacatgtatcagggatattttatctatctataaatttagctaagtctctatctgattgtttatttctagtcatctagaatctggaaccttcctgttttggggggaatctcagggaggctccacttcccacaaagagacaaaggaggtaggcattcctgtctcaatgccctagcagctagggctcaggtaagtgagcctcaagcaaatggatgttcaagcccaggacactgaatcttataattaattaaaagattttcaagttagtgggaactatggagtaaagtccaggcgtgcagtagtgctagtgagaacaacaggaagtgtcctgtgatagcattgcagccacatcatctctgggacatgacctggctgtgttattagcttttatcctctcttggatcctggggctttctgagaggcttctctagcccccttgtcaattatgtaaggtactggagatctgtggcaggcaggctctaacatagcccccagtgatccctccccactgattcttgtgccctcgagtaatcttctctctttgagagtgggctggacctaatggctaacttctaactaataggatatggcaaaagtgatgggatgttactcttgagattaggctacaaagagactgtgacttctgtcatcggtgtacgcattctcttgcctactctaaggaaagccaaatgacaatttggaaacgaccttacaaagagacctgcatggcaaggaactacctggttgccagtccatgtctggacaacgagcagcatggacctgaggtttgttaactcatgtgagtgagcttggaaacagatcctccttcagttgagccagtaggctggctagacctgctaggagtcttgtgagagaccttttgtcagaaacacccagctgagccattacccacagaaactgatgtcattaaccacagaaactgtgacatactataactgctcgtcgttttccattgttaagcattggataatctgttacatagaaatacataagtaattaaatgtccttccagaaaatctctcttctgtttaagtaaactagattaggtttctgttggttgcaatgaagaatgcagaaattgttactaggaatagaaatggatgggatcggactgaagacagtggaaatctctttaggattctggaaaaaaatcctgaaatttattgtattcaataagaaaacacttatttaaaattttaatctgtggtcaatttataataaagtaccctttgaaggcaaaatttgggtaaatccagtgtttgctaccttagaaaaatagtagaggtatgtggaatttaaagtcatgtagcagggtggctttttctaataatattgggcagatcagaggagaataaccaagggtaagtttctagattttcagcaaggcatagatgttttatgactttgccaaagattcaacaactgtttgaagccatagggctgagtcagtcaagaaccaaatgaatagtttgatctaattagttactaaattagaatgcagtcaaaattttggttcataatggctcttatatgaaaacggaaactcagaattggtctggcaatatctaggaagatgtgaagcccctggtgaagctgaaactgccaactccactgaacttctcatggcaaccaatgcagacccacttcccctatctggaaaagttgttctctctttgcctaaagatgtcataagtctttaacctgtgggagattccttactagggcaacttgcctcattttcactctgaaaatacttttaattgtttacttagttagctgattggaacctatatttaacagtggcccatatttaataaaagagatgtcagaaattccttggtaataatagagaagaagaagctaaagaatttcagaaggcttaagaaattggggtaattttatctaatatgacccagctggggcaggacagactttatttgccaaaattatgaaaaatagatttttttgggggggagaaaaatgccattacatttgccattggaaaggggctttggagattgttctctgtagatcagcatactattaaatgctacaggtataactggttccttggttgcagtggggatggttgaatcctggagaggcagaggccaggcttacttgcattttgtattaggtagagggggataaaatagctgttgagtccactaagattctacttgaggcccaataaattacactattagagaatccatagcctttttcctaattaccaaagggatcgatccaatgactcagcatctatgaatgaagagagttcaaattacctttgagaaaaaacaagtatatgctgtgaaccttcatcctaggattctccaaattattctatttctacttgccatcacagttgtatcatttatatgattttttggcactgcctgtgaatagacactaatttacaatgctactgcagattaccagtcatagtatgggcttatggagagtcagctgataaacagaactcaaaccaggtagggggaacttgggaagatgttagcaaaggataaaacatttagttagagaggagaaataaggtcaagatatatattgtacaacatggcaactgtggttaataacaatgaattgaatacttgaaaattgctaggagagtagatcttaggtgttcacaccagaaaaatgataagtgtatgaaataatgcatattttaattagctgtatttatccgttattcaatatatacatgtttcaaaatatgtatatcataaatgtatacaatttttatgtatcatttaaaaacatttttaaaaataacattaagaagttaggaaaatacagaatgcatacaataaagttctgaaggggagaaaatagatttttgacccaaacaatgctgaatcactagggagtcattggagattagtgccacaatacaatatttgaaagattcgggggaattgattcctacccctttctcatttatctctccaatatgactggtgctgaagatagatgacttcaggaaaatgacaggtggttacctgaaatgaaacttctgtttcaaatgtgatccccttactggagcaaatcaatgtaccctaacatctggtgtgcaattacttacttgaaaatatttttctcttatttccttttttttccccactgaacagaagataccagaacttttaaaagctagcactgtctctccaaactgtggcccagaattccatcgacatgtagtttcactctattgttcacctggtgctgatagaacctggaaagcagttctcttaaaggtgacggcatgacatttgcatggcattcattcacttgaaaatagctattgagtgcttattttgtgttagtttcctttttagtatttaaaacgtagcagtgaacaaaagggaacaaattcttgttctcataagcttacatcatggaagggagagagtaagtataaacaagcatgtgtatgcatcacatattaaattctgatgaatgctatgcaaagaacaaaaacgggagtaaacgaggtcagaggatgatacttaatattgggggttagggaaggctgaactgataggatgatataccaatggagacctgatggaacagagaaaatgcaacacaaaatattttggacaagaaagttcaaaatttaaggaataggtaatgcaaagacaataaaagcggtgacctgcatttcactgtgaacatagcagctggtacactgagtgaggtagggataaggacagaggcaggagatcatataggtcattgtagtctgtctctgagtgaattgggaaatggctggttttgtgcagaagtatgacattatctgacatatatttaaaaagaaccatttatttattattctcttcaggtggtatcagaaactgattcctcccatagcatcctgccacaaaataatattgcaactttaattaatatcaatgtttggatttatttatggtaagataccactgggtgacagtcctgtgacctctgactgcagggaccaaatcattatcacttagagaatgagtggaacttaatagtttacacccagcagcagaaatgtgggagtaacagcccattggcctttttcagttgtcaaagttatgttatgggtatagtagggtatagccttggatctgtataactctatgtttctgaagaactagtgagacagaaccattgagaacatatttacatgagggatcattaaaatacctgggaaagaactcaacataagggaagagaatcaagacgctcacacacaatgtgacttcagagacctctcatttaaaataacatagcttaagtttggctgatatagtctgtactatattctcacaaaaatactttaaaaatagaaaaaagaaaaaaccttataacatcttaagataagtttgagtatcagcgtgatttcagaatctgaaaggaatttccactgactctaaggtatatgaaattgaattgagaaccctatgagtggcccatccaaacaatgacttggcaagcttgcccactgtttctcttgttcatattatgactgtgctttattctgggaatggctatgcttctcagtcatgtgtaggaaatcatcttataagatgatttctataatatgtaataatggaaatgttaggaaacaaaatttgttgcattatgtcatgcaaactttgcctccttggcactttgaaatctgttagaaaacataagagtttctcttctctgtgcaccaggtgacctgaaatacatagtaattgatgtcgtcatcttgaatataaaagacaaagtgtggtgcaagtgtagcccttccaggtcaccaccacctgtcaggcagcagggcttgggaagtcttccacaatccacagaatatggactaagatttatggaataggatttactggggaaagtctacaaattaagagccaataggaaggaaagaagcatacagtacctgcattttcttcatgtcatggagttaatgccatggcctgggtggtctaatagaagtggaatatatttgtattagcgtggagggtctccattctcctgtgattctttcttctattgggtaaatgtgagaacaacaattgtcagcgggcatgcaatagactactgggtcagcaggcaatctgaatttagaagacagctttctatataaattgtctgggtaatcttgaaccccagtacttagatagtatgtgaggtctgtaggagactgaagttctttctccagggaggaaaaagccaccagtaacatgaaaatttgactttaggtatattctctttgactagagaaggagagaaagcctcaggctcgccacttgttaagggagttcagagagacctggttgctgtaccacagtaggtcatctcagatgagagaaacagttatcagactcccagtgcatgactccagacagacctctttttgtccactcccattaagatggattgcagagaaccttaagttctgtttggtcctttgcaacatttcagggagagaggtcttactagcagaagattgaaaaatctgtttttagatgagcctttatatatgtctgtatgtttactattttctgtgttcttcgtttccttgtgtagacccatttctccatttagtatcgcttttccttcattctgaaggacttgcttcattttgaaagataatttggctgggtatagaacaccaggttgtgagttttctttctttcagtattttaaatacgttttatcacttgcattgtttttgataagaaaactgttttcattcttacctttgtttccctgcacatagtgtttttttctctgcttttaagacttcctctttataactggttttaagcaattcgaatatcatctgccttggtgtcttgatatttcttgtgcttgaagtttgttgaacgttttggatcaataatttgcagtgttcctcgaatttggaatattttaggccactatttcttcaaacagttttttcttttccctcacttctcctttggatacttcaatttcatatatactagtctacttgaagttgtcccacagtttgttaatgttgtattacttcttctttttcagtctttgtttacgttgcagatagtctctagtgctatgttttcatattcactaatctttattcttcaaaacctaatctgctattaattttgttcagtgcatttttaatctcagatgttaaagttttatcttgaaaattcaatttggatcttcttctttcatgtctctgcctaaaatgctcaatcttttctttattttcttgaatatatgaattatggtgtgtattaatgtccttatgtacaaatcatagcatctgtgtcatttttgatctgtttctattgattgatttctttctcttcatcccacatcatattttcctcctttgcatatttggtaattcttacttggctgacagacattatacattttatcttgattatttttatattcctataagtattcttgaactttattctgggatgcagttaagttacttggaaactgttttatctattagagtcttgcttttgagctttgttaggtgagatcatagaagcctgtagtctagggccaattatcctttattactaaggcaatacctttctgagtactctacctaatgacctgtgaattctgagatttttttcagtctagctagtaggaacacaaactattcctggttatgtgtcagttctggggaatattacctgtaatccttttggcattttatccttggctttgtgtagtttcctcacacacatgcaaagattaacactctgctgaaggctcaagaggtatcctctgcatatttcaggggcttgctttgtgtataggactgtacgctctggcactctgccctgtgaactctagctaccttggcctccttggaatcctaactcagttcaactcaggaagaccactgggttctgcctgagcttcctttccctgcactgtggcctggaaactctgcctaggcactagagtgggacagcgataggtcttcttttgtttattttctctttatcagaaatcagtcttctttccatcttgattgaaaacagttctattatatatattatcatgaagaaaaatttaaggcagtattggaaagcttttctaatttttttctgttacttgatgttataattgtttcttttccttgtaaaattaaacttttttttgatttgggcagatatgagtgacttcagtaaaattcccataaaataattagaactctaatattagccaggaaactgggtggagttctttctattgtaaagattttactatttatggcagcttgaatagcattgccctgccatattcaatcattaaccaataatattttatccatgcagattttgtacctattttaatatctaaaaccacacctgaaaaccaaaacaattttgaggagactgatatctagaaggttagtatgcccaataaaggtatgaagaattctggtagcattaccttctggagattttagatttccatatataacatattttcacaatatcagacaatggggatgagtaagaattatattttaactccaacagacctacattgaattaaatcctgctagttctgatactaataattagaaaacttatacagcaagcgatcctatgtcttggaaggagatttaattggcatccaagtaaacagaaagttgggctaagtgaaatgtatatattctgacttttaaaaaattttaggtgtggaaaattcttattttgttagtaggagtagacaatgtaaatggaggaactctcaaaagtcttctaaaatgaagatgggatagatcctaaaatggtagagtaagaacaatcttttaaaattatccatagcaggaaacaggaaaaattattagactcctaccatcttttatagcactatgaagttctggcctctatgaaatagaagcagaaagtcattaggaagacagaggttgagatggaaaggtaacataatgatagaagtagtaatgagaagtgttaagtgtgtagtgaagggtagagctgataccatcaaagaattaaatcagtgatggaggatcacttgcagaagctctccaagatcagagagaataaagagagaccaataaaaagaataagtgggtaaataatacatatagaggaaaagaacttgtagaatgtttgatggttttagggtatctgacataaacattagaacacttagcagcaataaccagtgttaagagaggggaatatacaaactttaaaaaaaatcagcatacagatttaacattttcctctcatttatgcagaatcaattctacaagtcttgcattgtttttgataagaaaactgtttgcattcttacctttgtttccctgcacataatgtttttttccgtgcttttaagacttcctctttataactggttttaagcaatttgattatcatctgccttacaaatacagctttacaattttttttaatcagaaaaacatctggtactttctcttttggtgaaaagtttactaagttgcttccaaaagaatgatttttttagaaaagactagcctcagacttctctttagtactaaatgtcataatgaaatgacattaaaatggagaattttgagggaagaaatttgaaatgctaaattgtgcatttccccaaggtgtcttttacgtttctgagcaatagaaagacattcccaatgtataagggctcagaagatatattccacatgtaaatcaaacaaaagtagacaataaattaacctcaggcatttgaatgatcatcaaaaattataaattcaagagaagtggtaattatgaaagacattgattatgaatgattttttacacaatttgacacgaattcaggaatccagttaaatatagttttagctggactctatgtcatgatagttaaagtcgtttctgagatagtttgctgaatttttatttttttgctttcactgtatttccattgacagtgacaagtgtttcttatgctttattattgaaactaagtttagatagaagctcttcccatatttgatgaccacttaaagtaagtgggaaaaatacttgccaacaatcactaaattacttgcacttggaaaattactaaacacatacttcagagtagaggtgcatagaaaacttaatgaccatgagatatgagtggatagtttctgtatcattaaaaatcaagtaaaatgacttgatgtaagatttggggtattttagatattgggaatgcctgacaaataatctagtggcaaacattaattgtaagtcccttttcaatgtcatcttacatgtagaatttttgaatatttcatccatggtacttaaaaataagaatctaaaatatgatcccagatatgtaaacaaaatatgcttggataaaaagaagataaagacttacctagataagtccatggggatcgcaagatgtctttcttcttatgaattgatggtccaaactgaaattttcattccatcccattttgggatggaagctatttagtttagtgataattctgaatcgagggattcttaatggtcaggatttatgctgcctcaatgtcaagtctgtactaactcctctgtgttaacacattacaaataaatctgagagatatatatctgttatttatcaactcttagatattcattaagtttgctattctaatattttaagaagaaatctattttgattgttcatgataatgtaatagaaagtgttaagtttgtagctttagtagttaggggtagggattgtggtagggagtaaaggccttaaggtcaaagagtcatatcccatgctgttctctaaatcttgtatgaaatcttggacatcatggataaaaaccttagacatcatgtgtgaaatgtgttccttgcctattcctacctctcttcaatggatcttagaatatttgacctgaatttcttatttgggaacacttttatattgttttctatattctaaatctagaaatattggccaacttttcattcgacatctaaggaactctagagccttgaacttgctttgacaatatggcttctggttctaatttggggctccttagagatcctgaatataaattactccctatcctctattacttattggaaaaacctaacccctaatccttatgtaactcatcttgatgctaccaaaacctcaactctggcaccatgccttttttaaaaaaattaaataaaagttaaaataacaattaaagcctttgcaaattaccctttaagagatttatggattgctattttttctgcttaactccagtaaaaggaatttgacatttatatagatattagttttcatttaacacatgttgagactttaatccttattgggtcttgctgagcctccaaacatggactaagttcacaggatagtttttcacagatggatcacatcacataaataagaatgtaacttcactcagaacattctttcaaaagaaatatgttatttaactattcaaacctcttatcataattgagtcttataatttatttgttaaaggccctatttatctttgctcatgaaataaaatattcaaaaacagattacaaagtagcatggtcatgcaaactttggtaaaagactcagaacactttatgtccactacatgtggacaattctttctgcatatgaactgccctttcctgcatccacagctcttatcccttcactctgtattatctttacaaaagagaaggagacgacatacaaaattaatttaagtaaaggtctgcattacaactgaaagccattaactggcagtggctcaccaaagtacaggcaaaaatcaattttaattagtatttttggctttaatgaaaagtgattacaaaattggcattttagctaatactgttgagatttatggtgagctgatgctaattaattttctgttgaattgctgtaggccttagtgtcttcaataaaatggtatatttgctgatactagggctgcatcagcagttcagttttgtaacaaaaagcttcttaatggtttacaggtgtattttacactattgctctaagctacagtgcattattattttttccataaaaagactgttataggtaatcaaatttcataccattttattaattgggaccattttattttagtgtatcttgagtgttatccacagaactctttacttcaaatatagctttcttttgtctactcgcaggtggtaaaaaaatcagatgatatactttaattagagaacatttcatgactgatttctctttatttcttcatttttcctcttcccttgattgtattggtaataaattggcttctgaacctagttacatgctttagatccattttaagtcaggaaataaaaaaagaattaagctttacaatttactcttgtcatatgatttgagttttaaatgctctttagcttgcttttattgtgattatttcctcccttttttagaaaagtgaaacagtccttactgaagactaaaaattatatgatgatttctgtaagctgaaaatttgtatcctggcattgatttggttggacctatgaaagtcattttgttcatttgttatcggtgttattggcctgtcatagacagacacaaggtggcgttatccacactcaaaaggatggcctatggagaaagagagatagtgttggagtcttaactgaccgtgattggctttggggacttgggtaagttacttaacctctctaagcttctgtttactcaactgtgtgatgaaaataactatgcccatgtcaaaatatattttgagcattaaaattaaaaatgacttaaagcaaaacattcaacaaacaatagctatttttttttaaatgaaagccattttattttgaaacaatgttttgttaaacatcattttattacctactgaaatatatataaaattgggttacagatttttataatatttaggattcacgtcatgcagatgcattttgtgatcgaaaaagtctaagcacaatatatgattaaatcattaattagtaaaaccaaaatgatagaaaatttaactgagaactataagtcttagaattttgtagtagactgaatggaataggctcaatttaaaataactgagatgtctagttcagttctttttcttttaaaatgagtacatagaggctcatattacaagttaaatgacttgattaataaattacaggtgagtcttaggaagggcttgatcaattctactctagtggcaaattttatggcttttatatgtgctaaagggagccaaattcaaattgatccactagagattagcaataactatatgagaaagcgtttgtagtccagatttaggatgatatgggaagctgaatatattttttttaatttttaggtagaatttggagaggtgaaaaaatcttgcttcttctcattgttgcctaaaacattaaacagcttatcacatgagctgatgaacggtgtcctgtaggcttttagaaagtatactcttcaatatcccacttaaaatttgaaaaaaaatgtaaatgttccactgaaaagactctgggaatattttctgtttaaaaatttttaattttaatattttagaaggggagacaatttgttttccaggagcacagcacagatttaaatacacatttgctagtcaggtcttggatgaatggacccccttctccccacccccttctgcaaaccttcttacagcctgattgagatggccccattttggggcccacaaattgtataaaatatatcctcatacctcagagctatggcaataagagacatgcttggttttcattttccaggtacaatagaattatagaattataaatcagaaagaagccttagggaatatttattctaaaattctcattttgtagataaggaacttaaagcacagaggagttataaaacttgctcttgtcacccagccagtgtgaagcagatctgggaactacagttcaggtgctctaaaccatagcttagtgacctctcctttattctatatatccagtggtttagaaataagttaaccattttgttcaaaatgtgcttcattttatgtttctcacatcacttgatgtgcataaactttcaggtaaaatattttaagagagaaattctcttgcgcagaaggtgaaataatagagatacatatctgggatagttgctgggacacgaatatgcaaaattgttgaattttcaatgtgtcagctttggtcattacttagtcttcacctttgtatgtccagaaaacttgattttggggctgtatttaagaatggtcatgttctggccattttttttttgttaactaattcaaaatacctttatgcaaaatgacaatattgaactacagtgagaaatttaacttctgagtgaatgaatgaattattatttgctgttctggagaaaagtctacattaggaagacaaattataactgcaagattgctaatgaatcatagacacagagaagggaaattggttgtatgctcttaatgatcctggtcagcaagatgattgctaaatgagtctatctctactataggggtgtattggcctagaataccagaaaactcattgcagggctagcctcaagggtgtgcaacctgtgcagtcgcactgggccaacacacagaaggaacccactcttggtttaatgctctgctgttgttgtcctgatgtttttaataacattatctttggacttgtggtttgtaagtgaagtctgttgggacaaaggagcatgcctgtgaatgaatagaggatatatatgcagtatgtgaatctgtcatttcttgctgccttattttcattgagcatctcgaacacaataagatgttccatgaacacagaattccagtagacccaggatgtgtgggagttcagagagactcaaagtgtgttacttgtactaagtaagcacagagctgacagcccaagtggccattctttccattctcactagaacgtgcttaggttccagaaggatgacatgatgctatgagaaacacttctattctttcatactcatgctactttcctgtattagttacccacctaggctgaaaatgatgacatgggaggaaaaagagagcaaccttgtattagtccattttcacactgctgataaaggcataccagagactgtaatttataaagaaaaagaggtttaatggacccacagttccacagggctggagaggccttacaatcttggcggaaggcgaaaggcatgtcttccatggatggtggcagacaagagaacgagggccaagcaaaaggggaaaccccttattaaaccatcagatcttgtgagacttattcactatcacagaacagtatgtggaaaccatctccatgattcagttatctccccgccacaacacatggggattatgggagctacaattcaagatgagatttgggtagggacacagccaaaccatatcagacctatagtttcttttcctttcagtccttttgaattcttcagtaaactgaaggtagaaagtattggtaaaatgtgcacgtaatcaagaagtgaaataaaaacagttgatttagttttgtgctgtgtttctcctttgctggtaagaatgaaatatatatgcatgtatgagctacaaaatgtgaattgtgtgatttcaataatttcacatacaaatgctcttgtatttacatttaaaactaacattgaacaatataaatagtgaagttcatgctaataatttaaaatattaatttttcttcagttaggaagagattaaatagtgaataaaaaacaccacatcgttgagactgcagaaaaaagaaaaatctttatttttttaacacttttactggcacattttcctgctgttttaactaacaacattgaattttcactttgcgctgtaacctacaaattttggagtcagtactgactcattgtggtccataagagagcattctatatcattctccagacacactgccattttctgaatttcaagcagataatcttctctcttttggtagaaggaaaaagaaataccttttttttcctttagatcgattacaatatagttgattatatactcttttatgatatcaataataattcagtcatgccttcttgagattgtatcctggtcctcttgattaaattttgatttgatttgcaagctagcctaaatttactccaagtttactcttcagatggctaatttcatcctacttcacagagttgtaagggcttaatttatgtattcaataaatatgtactgagcagctatttccagcagggcactgtgcgaggtgctgggactcagcagtgagtaagatagacagggtctatgtcgttatgcagatgcatgtgggtgagggagacagacaataacaagtacataaaaagggcaaacttcccagatttagatgaatcggtgataagaaaaaagcagtgtgatggaaaaaacagtaacaaggaaaggccattttaaatagtgtaatcaaggaaggactaagaacaatgtataatatctgatctgggacctgaataatgagtcaaagttctagaaagagaacgtttcaaacagagggagctagaattatcaaagcctaaagataaaataccctgagtgtggtgagttgaatgatggcctccaaaaagatataaacatgccccagaccttgtgaatgtgagcttatttggaaaaaattacatttgcagatgtaattaaggatctcaaaatgagataatccttgattaaccaggtgagccctaaatccggtgaaaactgtctttacaacagatagaagagaacaagacagacacaaaggaggaggccatatgaaggcagaggtacagattggagttcagttgccataagccaaggaatacctggaactcccagaagctaggaagaggcaaggaagaattttgccttagagtctttggagaaagcatggccctgtgacaccttatttcaagtttatgtcctctaaaactgtgagagaatacatttttgatgttttaattcacctgctatggttttaatatttgtgtacactccaaagttcatgttgaaactgaatccccaatgcatcagtattaagaggtgtgacctttgggaggtaattaggtcaagagcacttatgaatgaactagtaatcttacaattgactagaaggaactagctaggcccccattttttgcctttccctcccttctgccatgtgaggacacagcatttgtctcctccagcggatgcagtaacaaggtgccatctgagaagcagagagaaggccatcaccagacactgaacctgccagtgctttcatcttgaacttcccaatctccagaactatgaaaaataaatttctgttctttataaattattccatcttaggtatcttgttatagaagcacaaatgaactaagccaccacccaactggtggtaatttgttgtggcatcctcagaacactaatacacctgatattttttaaagaaataaaagggggtcagtgtgagtaagataaagtgagaaggtggaggagaccgagaggatatcagaaaagcaggccaacgccagattccaaaaggccacgtagacatgggaaagagctgggatttttattatgagtcatgggaagcggttaatggatattaagctagagaattctttggtgtacatttaagctgcagtgcaaagagtgggctgtcagaaagtcagagtgcagcaatactgtagcaaaaagtaggaaaaatactatggtagttgaccaactgagagatgatggtggcacacacccgccttgttgtctcagaaatacattacggggaccagattgagatatattttgagattagaatgacaggacctggcgagattggatgtaaggaatcaaagataacttctgacatttgtagagcaaacaagtaggtaatggtaatgtcatttattcaaatggcaatgactagtagaggaacaggtacccactgttgatagtggaaatcagaagattctgtagaacataattaaggtttagaaatccaaatggaaattttagatagcattacttgagataatgtatgctaaaagcctaattagttacacatatgtaattgctcaaaaaatgaatatatcctttaacattttatgatgacttggttttcttactttagttgtcacaaaatagctattttactgtttggggatatcactccatcaatttatcactgcggtcgttagttcttgccttcatttattgttagaccagactaatggcctttgtgggcaaagttccataagccaagctaattttcacgtctccatatttgctatttctacaccaatccacaggtcatagagtgtaatgtcagtttagggctaaaattgcatcacaaattagcaagtgattcctccaaagtaagcagttccctgacactggtgatttgcaaatattaaatccaccaagtagaagaaatgcaagaatcaactttttgtccaaactctactttaatcttggctcaaaaagcctgaaaatctggacttatggatgctctttctaacccttctccatttaattattatgactctggcagaaagagaaagtatatattttttccctaacaaaggtaattgaatattgcctaattagattaactgcactgctttgaagccacagtgatagatgatatataggaggcctggcattgataattgtgagagagaaattatttaatgtgaaatgaagactacagagtgcagaggccacagctttgacctgggtgtccccttcccctctcaaactttggatatatatttttatattaaaaatggaatcttttcaactattaaaatacattcaattcctttttatggcttgtaactgtatatgctaatttaataagtttagattgcctgaattatttctggctgagcagagcacagcagtttagccgttttctgattagagaagggaggaacacaccattggcgctccccacattcaccgttgcaataaatataaaaacaacagtactgggaaaccccagagtgccacatacagtggtccttctgatctcattttcattggattcagcctcaatgtagtaagagtatagatagctgtctgcctttcagggtaaacagatatgcatgttatagagaatgacttgggaaaaagctaccatcttagatgtcataccacctgctctgacctaaagcactttggcagatattgactatgagaaaaacttgtgacgcttcacagtgtgggtggtgaggacaagaggccattttttaatgttccataaccaaaactttaactaaccatcttgggaaaatggccaccaactttttctttgtattgcttgtgctgtatctcttcagtctacagaacgttatacattttccacttacccattcaggacttgtcgagcacctactatgtcctgtgcttgtgagaagtatgttgctttatttgatgatatggaaactgttaatgaaggaaggagttaacattggtaactgacaaatagtgaaagaggccaaactaaaaatctctttcttcctgagaaaaagaggaggaattgatttgcttttctcaaaaatgatggcgttctcatttgtttccctaaaacttaaagtagaagaagttatgaaggaatttcaatgtttcttggtgtctcttcaactctgagacttttgtgaaaataatatggagtcccagaagttttaaaatatttatttctttgtgaaatgagataattcctgactaagcaatttgggtggaattaaaaaacaatgagacatggttggaggaactaggtgtgggtatataagactttttatatttgcatcttgttcggtgcatagtttttacatccatgaatttagaaaatcattgcatttaatactgggaaataataaagctgaaaatatgtagcagcaaaagaaagaaagaaagaaaaattctgaaacccattaaaccctatcagcaaaaaaacttggcaagattttgaaaatttgtttatgatctttgaacttcaaaatgaatggcatgcgaggtaactgaataatgctttcaattgaggaataattataagcactggaactgcccaaacatattgataatactatatgctgaaaattttttttggatctattttgcatttacagttgttagtacaacaaaaccatatgcaagcctctgtctgacatccatccttctggggggcagaaatgcaacctactctccagccactttagacctatcgaatattattggttatagatttgttttaatgttcagaacttcacatttttttaaaaaaaatagaattttggtttacaatgattttcagatgacactaaagaacactttagtattgattaatcattttaaatttgtaaattgagatgaacacaattacaaaacaatacaaaattagtattttctgtttgggaaattatttttatctcctacattgttcttgtacagtgtattcaatataaacagacacagtgtttaagcttcagcttcaataatggctgatggtgatacatttgagtaattctattaccagttgaatgagggaagctgctgtgaatgcgttactgaagtaggatattagccaaaattgtgacttatggtgatcaaaatagatagatgtttgacaaataattgataaactttttagaagtttgccaaactcatgggaaaattttagaatgtatctgtctttaccagattaactatataatgaacagatctggaatttgctctacactgtttcataattatgaattcaagatcaaacatgactcagatgtataacaatactacttaggaaagtagtgggatctgtttttctattacattttaatttcaattatattagtttgctagggttaccataacaaaataccagagactgtgtagtttaaacaacagaaatttatcttctcacagttctggaggctggtaagtctgaggtcaagtgagatttggtttctgctgaggcctctctccttggctggcagatggctgcctccttactgtgtcctcacatggcctttgctctgtgtgctctcatccctggtgtctaaatttcctcctcttataagaacatcagtcggattggattaggaccaacactaacagcctcattttaacataatcatctcattaaagaccttttcttcaaatacggctgcattatggggtcctgggggttaggacttcaacacatgaattttttgggaaacgtaattcagcacataacaccaatgtaatttgtccatctgcccgtgtttgttgagcttctcttagtcatcagcactgagctaagcacaggtgataccatggaggcagggtttctgctttcctggagctaacagcctaatggagtagaaagtcagttaagagttatgcagacaaaaaatgaggtaattgcagatggtgataattgctgtgaaggcagtgaaaagagtatgtggtggagatcaaaggagtgagggtgggagaaaaagggtgtgaaacctgcttcgtgtgatccttaggaaacactccacagagggacattttcctcaaggtgtgacaggtggctgtgtttaaaaaactggaagaaagggaggctgaggcacaacagataagaagtcaaatgagatccttgaagggggcatcaggtgtttggatttatatggccttttaggcttagggaagagttgggtattatttgaattgcattataaagtccttgaacacgtttaagcaagaaaggcatttctgtttgacaactcttactcttactgctgtgctgtagcttggaagggacagagtagatacagggatcccatttaaagggctgtggctgtagtgcagggcagtagcaacagcagattggacgaaggtggtagcagtacagatgagtgacatagataaacgtaagatacatttgaagggtaggaatgacaagacttgaagttagatgtgcagagcaaggagagaatagaaccaacgatgactcccaggtttgaacacctgagatgttagtgctagtgtgaaggagaaaactgggaggggacacacttacgtaaggatcatgattaagaaggggtgttgagatccaagagtgtaggttgggtcatgttgactttgtggtgcctattaggttatcctagaagaattgtagacttgttggtgtaggaacatgttatgaaggttagaaaagaaaaactgaagttggagtaaaaatatattcatttactaatgattactagtggtccccagttaaaacagtatctgtgagcttaagtaacttgcttttttttttttattattatactttaagttctggggtacatgtgcagaacgtgtaggtttgttacataggtatacacgtgccatggtggtttgctgcactcatcaacccgtcatttacattagatatttctcctaatgctatcccttccctagtcccccagcccctgacaggacctggtgtgtgatgttcccctccctgtgtccatgtgttctcattgttcaactcccacttatgagtgagaacatggcggtgttgggttttctgttcctgtgttagtttgctgagcatgatggtttccagcttcatccatgtccctgcaaaggacgtgaactcatccttttttatggatgcatattattccatggtgtatatgtgccacattttctttatccagtctgtcattgatgggcatttgggttggttccaagtcttgcttttaaattaaggtttgactaaaggttaggtacagctttgtcttttttttttttttattttttccgtagatgttggacatttatatgtgacacattctgggcttatagggtttcatatttgtgttcctatctcatttgctgatgctactagtaaaggcaggttaagggggcaatgtgaagttatttgaaactgaagactgtcatgctagatttttagagtgtaataaaagagcagtttagaacttaaatgaaagtgccaaacaaaatgcttttagtgtggctttgcaaattgtaaatttggcaggaattttaagaaatgtttggttcctctggctttagtaatttagtgagtttagtgatttagtaaagacttcccgttaactacttcttaaatatttaatgatctaggcagaatggtaggatgataaaaagtttgctgttgatgaagaaaataaatcatttggccccaaactattggaacctgaaaaagaatcttgtttttatataagtttttcttatttttaatgaaagtaattgttaatggaaaagagaggtcaggaaaataaattgtgcacatgaaaaggcaaaacatatgacagagcatcttatgtaaatttgataaagaattgagtatgattttaaaggtaggaaaaaaatcagattagctgttttgtcattatccgcctctttagaagtttgttttgcgggaaggattctattttcagtgtttaaattgctcccaagaataaagaaagatttaccaggagaagtttattactaaatagatccggagaaatcttggtatttacgtatactaaaggctaatcttcatttactcacattaggacagtgataaacagcagggcatacatctgaattttttttaagtagtgattaattttatagggtgctatgaacaaatcttaggcattaattttttccaatgtctttattttactgatgaggaagctatgacctatacaggtgaaatgtgactggccacagcttgttattggaaagcctggttctaacccagagattctgacttctaggctagtacctttcaactccataaagcttcattttatagcctggcatcttcttttgttaaataacaaaacattttgatagttcctttgttaaaagtataagtctgtactttgttagaagaaaagtattaattgggtaggaaatcagttactttttgttgggtatttttaccatagctagaaaaaggtttcctagcaaggatatactaggtttaaagcagattgggtttccatgtgcctctactcaaacatattggcatcttttgagtagtactgacacgtctttcctgtttagcaaaggcttagttgtcccttatatcacacagttttgctaccactctccagaatgagggaaacatctctgaccaatatttggaaagacacttcctgaaatatgtgaattgagtttgtcacttttgattttgttaacatgagtttcaggctaactattctggctgacatgtttaagcgaaggggtaaatgttttagatccccacaaatatatttatttttctctaacctgtgtctagataggttttcaaacattgaggaaatagaaacatactgtggagtatatttaatttctcattaggtacactgtgtgcatttcaataagtttaatatttattttcatgtttgatagagcagttttcaagcccaagctctttatggattgtctatgtgacatagaaactatacagtattatcagctgtgaatgcaggaagagaccaattctgaaggagttaaagcaattatgcccaaaaatttaagaaagagaataaagactattatggacagctaaaaatgtaagaggaaagatgtaatactgtaaagcaaaatttggcaaataaatattttttctcttgccaaagaaccataggatctttacatcattgtaattggcattgctagcttaaagcactatttattgaaatgctgatgtagcattctgcattgacctcagaagacattttgttgcctgcagaattgccaataccagaggtagccaaaacagtttttggtttccattaaaatatggaattggtctagcatgattaatttgtcatggctgaaaagactaaaattttacagcgacttcattgcaaatgacattaatattttagaaatggaacctccatttgatcattgattctatcaaactttcaagtagtcttacaaaggtagatcaacaggagcatattttgggagaaaaacggaaaatctagttgtctatatttatttcttaatatttattttgaaaagttttttctgcttcatttgaaatcagagttagtgagaagtacaaagagttggtaataaattgtacaggaggcaatagattgcttttcagttattgcagttctgaggactgaaaagaaggcagcctcatgtaagactgtaccaggataactgtactaaccactacacattttcagcactgattatatctatatttatctctatttatataacatatatagtatgtgtgatatgacatatgatatatgacataaatgtgtataatttatatatatcacatataaaatcacatatatcacaccttatatgacatatatgacatgtatatatatcacatgtgagagtaagatatatatctgtgatgcaaatgtgtagctgtgagtatggttttcctggtacaggctaatattaagctgttttcttctttgtgattttcagtttttcagaattgcagtaattctgctatgtttatacatccatatatctttatccatatatccatgtatatatccatatatccatatacatatacagagagagagggaggaagagatcacagaggcagaaaacttaactaactgatgtgtgatagagaacctgttctaataaaatatcaaattcaagaccacatgcaaattctacaaacatttttttctccaattttttatatggcttatgactgtcataccaacttggccttagtacattatccatgtttaaagctggatgatgtagtaagttagatataacaaaatactatacagccttaagaaagaaggaaatcttgtcatggatgaacctggaggacatttgctaagtaaaataagacaggcacagaaggataaatactgtatgatttcacctatatgtggaatctacaaatgttaaattcatagaagtagagagtagaatggtagttaccagggcatagggtgtaaggatggataaaaagatgttggtcaaagggtatgaagtttcagtgagacaggaggaatatgtttttgagatctggagagtggaattttaaatgttcccatcacaatgctgagtgtgtgagatgctggatatattaattcatttgatctaatcattccactatgtatatcaagacatcacattgtgccccacaaatatatatataatttttgtatgtcaattaaaaagagaaaagaaaaccagccactaatatcaaaacaatacttgctatgtccccgatttcttaacgaattaggcaacaagcctctgtttttccagctcatttgtccagggctgtcaccatgaccatactcccaagtaggtgagactggtcgtccattgatcactcttctttcacagttcattgaccctgttttaaatttactttcttctctatccagtttagatcctaaaatctatcctttttataacactcaacaataatagactgattgtggcatctctcctcactttccctccttcccatccttccattttactcacggtgttccctccatttcttaattttgttcttgttagttggcaaatatgtaactggaactgaagagcttatatagagaatttaaatagtaacgaagaatgaagaattatgacaaaatgaacccacccttatgtccccctactgaggttaagaaacaccagttctcttcctcaattgtgtttccactctaccctctcctgagattatcaatatcctgacttcgtataagttatttccttgccttttagttttgaaaactgagtagcaaatgtgaacctgtataaagaaggagcaatcttccactactacaaaaagcttccaagtaaaagataggttgaacagggtttgaggttcatagtctcatgcctttagcttccttgagaactacagcaacctctctttggaaagttagcgacagatcacgagtaaagtatgagaaaaacagggctcaccacagttagcatatccggcagggctaaagtgtggactaggttctatgtctatgaaaaaaatgtggtcagagagagtggggcattgtgttttctgcttttgaatttctggtgtcatacctgaagctctcagggctaagtcaataccaaggtggggaagaatgaacatctttatctggtccacagtgacagaacatagggggagagtagaaattttatagaatatgttcataagaattcaagtaccaaaagattcttggtcatcgttacctgaacattctatccttaggttaaaaagacagtttaatggtgacatgatgatatctctctctttctgtctctttttgtcataatgtttcaattagaatgattgctttttctgctggatgtagggctggcatcttaggaccttccttcccatcttccccagaactctgatttctttcctgtcttgaagcactatcttagatttttttggttgtttcttgataaaggattcatgggaagtaaaatatttgagactcctcatgtctgaagttgtttttattcaatctcatactttaatgatcatttggagggatgtagaaatatcactggcagaccattaaccttcaagattttgaaggcatttctccagtgtttattgtttcttgtgttgctgtttatcaagtcatttcaaatcttgtttatgtaggtcacttgatttatttatcttttaataaaagagaaataattttttatcttaaaataaatttttatcttaaaaataaagaattatttatcttttaatatctttttgaaatttgtagaatcttttctttgtcctctgtgttctgaaaatttacaatgatgtgcattggcatgggcctattttccttctttttttttttttgtggtgagtggggcattccctaaggtgttataattcaaaaacttctgttcttcaattctggaaatattgcttcagctatatcattaataagtttctgttctttccttggagatcgttttgttccaaatgtgagacatcctgcactgtactcttttttaaattcctcctatttttcatctctttaacttcttggtctacttctgagagatttcttcaacttttatctcacatatctgttgttgtgtttttcctttctgttattatgcttttaatcatgctccatgaatgtaatatcttctctaatttttctgaggagattaatggtaggtattttatagtttgttttcttttctcctccccatggttttttccttcaagttgcagggagttgttttcctgtttgttagttttgtttctagctttcatttcagaagtcttccccaatatctggtatttctgctcatgatttagaagaatgaaaaatcaggtttagtgttctaaatgtataggtagggactgcaatgtagagttttactgtaggatgatatgggagagtcttacactgaggaacttccatgtcattatcttcagatatttccgcttaagctaattacagtctccagcaaattgtgttccaatttcatccttgagggtaagatcctgattccagcattctgggagtggagtggggaaagacgctgagattttctgccttcagcatctagcattcatgtggctatttattttcttttttataaaataccatacccactttctcaggtatatttaatctctctctccctcctctctgtctctatctgaagtgaatagttttcatctttttttctatattttattttttagagcagttttaggttcatagcaaaattgagcaaaaatgtacatacagagagttcccgtatacctctcgaccccacacattcacagcctcattccatatcaacattctgccttagagtggtttttgttacaatcaatgaacctgacacatcattatcacccagagttcatagtttacatagggttcacttttgatgatgtacattttatgggttttgtcaaatgtataatgacaggtatccactgttattatatcatgcacaatggttttgctgccctaaaaaaccccctgtgccctgcctattccataatcttcaacacatatttaagcttcctccattaaaaaaaatcttatataaccctgaaagtctgccgctgtatctcttgtctctttcacaggcaaacttcttcttttccttgctttcttatcaacctgctttagtctaccattcagcactagttttaatttttttctttaaaaaaaacttaaaaattgacatataataattgtacatattcatggagtacaaaatgatattttgatatatgtatatagttagcaatgattaaatcagggtaattattacattatcacctcaaatatttattatttcaatgtattgagaacttcaaaatcctcttgtctagctatttggaaagattctatacattattgttaactatagtcatcctacagttctgtagaacactagaacttattcctcctatccatctgtaactttgtattcattacccaacttctcattttcctcccctatccactatccttctcacaatgagagatcatctcaccagagttagaatggctattaaaaaaagacaaaaaataacaaatactggtgatgatagggagaaaagggaactcttatacactgttgatgagaatatacattagtacagccatatggaaatcagtatggaggttcctcaaaaaaccagaaatagaactaccctatgatccagcaatccaactattaggtgtttaaccaaaggaaagaaaatcagtgtatcaaagagatagctgcatccccatgcttattgcagcactattcacatagccaagatctggaatcaacctgagttcatcagcagatgaatggataaagaaaatgtggcatatatacacaatggccataaaaaataatgaaatcctgtcattcatggcaacacggatgagcttggaggacattatgtcaagtgaaataagccaggcagagaaagacaaataaataccacaagttctcactcatatgtgggagaaaaaagttgaactatttgtgaaatatctctagctaaggccatttctgtgtcacaaaatacaaaatggactttttttggttataatctttcttggcctttcatgagctcatgagcatctaacattctctttctttgatttcagccttatggttttcattatacctgctatacaactccctttttgcctcctttacaggataattctcccataatcattcattaactcagaatgggcaagattcagtgcctgattgtctttttccccttgttttgtactctcccaaggcagtcttatcagtgctccttgctttaattagcgcctatatgaagacaatttatgaagttacatccctgacctggtgttatggactaaattttgtgtctcccccaaattcataggttaaagcccttataccctagtgtggctatatttccagatagagcctttaggaaattaattaaggttaaatgaggttttaagagtgagatcatgatctgataggattggtgttgttataagaagtgacaccggaaagctgtccctctctctctctgtacacacacagagaaaggtcatgtgaggacacatgaaagcggccatctacaggccagaaagggagactttatcagaaaccaaatttgccatcaaaccttgattatgaactcctgggctccagaggtttggggaaaaataatgtctgtttttttaaactgtccagtctgtggtattttgttatggcagcctgagcagaccagcaaacctggtcatcaaatggggcgaagagcctttattcagatgtcagctttttcatttgtatccttaaaaggtccatctaactgcctaaaactcaaactcatgatcttttttttttttttttccaacttttattaagttctggggttacatatgcaggatgtgcaggtttgttacatgggtaaacgtgctgcacagatcaacccatcaccttggtattaagcccagcatccattagctattcttcctgatgctctccctccccagcacccccaatagggcccagtgtgagttgttccccctgacgtgtctgtgtattctcatcattcagctctgttagcctcaccaaactgacataggaacagaaaaccaaacacggcatgttctcacttataagcggggagtgaacaatgagaacaaactcagattttacactttgctgttcattctcaatttgcagaacctggtttctttccaatattctttttctctgttaatgacactcccttctgtaatctgagtcagagccctaggagtcattcttgacacctccctcttttcttcaccccacattccgttcattattccactgacccattatcttttactttcttaagatttttaaaatctgtccacatttctccttccccatttcaaacactttcttccaaggtgccatcatttatttgatgtggaagtccccccactgatcgcttcgtatcaatttttgcctccttctaaccagttctctcctgaagccacggggacacctttaaaatgtcaaactagccaggcatggtggctcatgcctgtaatcccagaactttgggagaccaaagcaggcagatcgcttgagttcaggagtttgagaccagcctgggcaacatggcaaaaccttgtctctacaaaaaatacaaaaattggcctagcatggtggtgcacgtctgtggtcccagctacttgggaggctgatgcgggaggatcacttgaaaaggtcgaggctgcagcgagccgtgtttgcaccactgcactccagcctgggccacagagtgagactctgtctcaaataaataaataaataaataaataaaattatcaaactcctcaaataccttaatctagaggtagtgatgctccaggaaactggaagcctggatatagtacccatcagggcagtccacagaccaaggcatggcagctgaattcatgctgaatcatcataaataggaatatacattaatcaaaagcagaaaaactgggaatttgaagacctaggtacctctgaagctcaggccatacagtagtaaatcttactcctcggaccaaaaaaaaaaaaaagaaagcaagcagaaaagggagtttgttgttaccaaggttgattaaactgtttgttgatgaagaaacctctgaaatggagtcaacttgtttctgtgtctgtgcttcagagactcacctgaggggtaagtctgtgaaaagagataatagcttattcactacagggtcaagcgactaggaaagatagtaaacaactaccataaatgagtgtcatagggaagaaatctccgaagctcggtgtcaggtttcaggtgttccagcgttgtatttcccacagtaagaactataatgaccaaaagaagtgaggccgaagttctttcaggtacaaaatgagacgcaaataacatttctgtggctaagtcagtcatttcttcattttgggtactataactaggagaacaactaaattggcaaaggaagctgcaggaatggactgagaaggtagatactaacactatgccagaaagcgaaaagcaaattccttttcagcagcaaccatctcaaaatgtgtatttgtggaaatccatggttcagacgcttagcaaatttctgaacttcggaagttcaggatgactttgatgataagtccttcaatggaaactgacaggaaatactagctgtacaaatatatataagcagtaatgtaagggaaaaaaactaaatattatgtctcataggaaaataacaaagcacttgagtttagatgaagaggctgaataactgatagatgacagagatgaaatgaatgaaaatatttctcaaggaacagtcattctcaagggaaagtcattgtcaatttcagtactgtatcctttacaaataatgtctcaaagacaatcaaactcaaaatagcaaaattatggtagagcccttaaatatgggtctagagactataatgatatctttagcccaaacaattgcacttgtcaacatggatgggaggaaaacagagggaacaccaacaaaagactctccacaatttcgtggtggtggtggcaatgatgatgatgaagatgaatgcaaaagtaggcatcagcaaagatattgccatctgagagatcgagattttgaatgtgatactcaactatgcaagtttaaacttgacacaacttgggataaaggtgattctgttttattggttctcagcagctgtgtaagtgagttatctgaaacaatgaaaatgacaaagatacagtgttttgcagaaaatagtcatcaaaaagtccttgaatatagactcatcggataagatgccatgtgacattgtattgtttgcaattgatgtaaggcctggattaaatctggttaggagacatagaagacaaggcaagtgaagttgccatagagcaacagataggagaataggaggaagaatataaaaagtaaagaaccaccagacagtaaaaagggataaagtacgtgagttcagtgacaagactaaccaagaagcacaaagtttaaacttttgagaatgacaggcaacagcccagaccttaatttgagtattgctgagctttgaggttggaatattaatttttttatacaggcgccatctcagctcactgcaacctctgcttcctgtgttgaagtgattctccatgcctcagcttcctgagtacccgagattacaggtacacaccaccacagccagctaatttttttattttttgtagagatggggtgtcacaaggttggccacgctggtctcgaattcctgggctcaagtgatcctcccaccctggcctctctcaaagtgtagacattgaggggcgtggtggctcacgactgtaatcccagcactttgggaagccgaggtgggctgatcacttgaggtcaggagtttgagaccagcctggccaacatggtgaaaccccatctctactaaaaatataaaaattagcccgatgtggtggtgcccacctgtagtcccagctactcgggaggctgaggcaggagaattgcttgaacccaggagacggaggttgcagtgagccgagatagcaccacttctctccagcctgggaaacagagcaagactttgtctcaaacaaaacaaagtgtggagattacagacatgagccaccacacctggccctggaatattaattctgatgcgggaaaactacactgtaaaagaaaaatttgtgtctaggtcagagaaagagagaaaaggagaaagagagggaaaggacaaaaatgagccttttttaaaaaaccatcaattcttctgattttaaaaaagaatgctatcctatgatatatgaaaacttcagaaaaactcaaagaaacgtgagaaaaaagcagaatatggctggtttgatgagtgttccaaaaatgatggctgagctaaaacatcgtttcaaataactgaagatcagaattagcatatatccaacaaagtttacaagaaaagtgatagagattgttttcataatagacttttgctgataatatcactgtgtttatcattcatgaatccctgaggaacaaaggaacagaaccaatgtagaagaactgctggttgactttaagttcagagaaaagaatacagaaaaaatggcagaaaatgctggaaggttgtgtcaatgaacacattataaagaatgaactttgaactttgtaattaagattcagtaagcatactgccacactttagtgacttcctttcatttattactgaggacatattgaagacgaacagcatgacattaattaatttaaagtggaatgttctcatttgtgtacagatttttctctaggaaaaaaattgattgaagagaaaatcggtcatgtgcccttggggtacaaataggtgtgtttgcaagaaacccacccaggctcatactgtttgagaaaaaagaaaaataactgcaaccattttcaaataaattaaaattttatgaagattttagttcttcattggttaaagaatgatgaattaacaaatattcaggagatttacaatttgtaaacattcaaagaattcttttttgtatgattgaataattatgtaaagaatactatttaaaaatactttaaggaattttcattgcttttaagataaaaccaaaaatgtttaacatggcctctaatgccaaacttagctggtatctaccttctttctctgcatcctttctctcactcactctctctttttctcacatttctcactcctactttctgcctgctttctactctgttcctcagtgtgactagctgcttgtcactaaagttcattctgtcttcctagatgatgtccctgtttcctaaccaaacttgctttcacctcatacatctattcttccttgatattgtagataaatcttcacttctaagaatcctttattcgcctcctcacttgggtcagaggttcttttaagagcctttctttgttagcactcatcacaattacaatatattttaaattgtgtcatatccataagtcatacccttaagttatacccatctctcccatgtcatagccatttcaattgtgtcatacccatttcaattgtgtcatacccatgagtcatactcttaagtcatacccatctcttccatgtcagctccaagaagactgggactttgtcagtgtttttactgagcaatttattttcagtgccttatactgtgccctacacaaacctatgtacttaatattttttgctaaattaataaaaatgaatccaaattaaacaggtatactaagtgtctgccccattaatatttcagtagttgtttatagttgtgttggttaaaggctgtgtaaaaggaattcctgctgtctgattgctttgaactgggacattggtcttttcctgcctttgtacttgaactgaaatattggcttatgagcctgccagctttcagactggaacttgcaccattggttctccagtttctcaggcccttggacttggcctggaaccataccatccatgtgcttgagtttccatcttgccaactacagattttgtgagttctcagcttctataattgcatcagccaattccttatactctctctctccgcacacacacatgcgcgcacacacacgtatgtaaatatatgtatgtatgcacctcagttatatgtttgtatctcctataggttctgtttctctggataactctaatacaataattagttaaattaagttaaaacagaataaacaagaatattgctgttagcacaaatggaatcatggcttcaaatgatttgtgtcagtgggactagtaattattctatctttgtgtgtagtttaaacgaaggaaggctatttgtgaatcagactccaatcatgcttctgataatggtggttgcactaccatctgaaggatagcattcatgggtaggctctgtggaaaggactggtgcttgtacacactaatagttattttgccagcacttgctcttgaaacacaaatggcacatacatacacaaatgtactcacacacacagagattctctttttgtagccagtaatgcctgcttttaaattcaagcaacaattagcagtcctgcattggaataggcattataaggtactatatgccttctgtggatgtaaaccatctttttcatctttgtatctctaaaccctaacagactgcttggaccataacatgcaccaaaaaatattgtatgatgaatggatttaatgcataaatgagtgcataaaatacatgctcgtctgtgattaacggaatgcacatagttcacgcaaggagttttgagcattgagaatactacatgtgtttgaatacttgaaacttgtgccattagtgatatttcttccctgaaaagtacagtattatttaataagaagggaaggattttacccaaaacattacaatcctggagattgcaatcaagttgctgatgaagcctcagaaaagaaccagacagagcatcatcatattaaaattttgaagaagctccggagaagaacatcagtgttttagcaaagcaagtgatcattcatcattcagaggcactcattaagtgcagtattggaaacaaatttgatagaatatgaaagactatggcacttttggtttccttggcaggaaaagctcaaatgaagttttggtaaattgttcgagggtattaggaaatgcatctaaaaaaatgcttttaacaggaatgctgtgatggcacatttgagaaggaggaagcccacagctgatagtgatgcatggctatttaacataaacaaccaaatccaatttagctgcttcatcagaaaatttgaaaggcaagtatttgttaagtttcaatgacctcccaatatataaatctatagcaaattctaccagagagattatggaggattttggtactggttgctgatctaagattgagttaaatttactggaatttctttttcatggccccaaattataatttatgctactaaattatgttttctgtcaaatataaggctatatattttactatatgttattgaaagctaggaaattatgtacctgatttgcaatcttgttccataaataaggaacatttcttttcctgtaaactgagattctcaggctggaaattgctcaattttaatggatactctagcaatttattttctcctaattacatagttttatatctggtttttaaacctcaatatgggaatgtctcatgattgtttaattcatatttgaatattttatttcagtgatgctgcaggtttgaatgaccgtctctaggaataaatggctagtgagagatcccactccgttttctgcatgaataagagatcttatcacaactttgtggaacaaaccttgggacagggatagagaaaatcatgtagggagaaaaggaaacaaatcactgccattacccaaacagaaatatgctggcttcctgctaccacattttctggaaagtataacttaggggggtgttatggcctgaattctcttcccctccctccaaattcatatattggaaatcctaatccttagtacctccgaatgtgactttatttagagatagggtctttaaaggggcaattaaattgaaatgaggcttttatggtgggacctaatccaatctaactggtatccttataagaagacgaaatttggacacacaaataggtaccaggaaagaatgtgcacagagaaatgattatgggaagtgacacaataggttggccacctacaagcaaggagagaggcctcagaagaaaccagacctgatgacaccttgatcttgaccctcctaagcctccagaactatgagaaaataaacttctgttatttaagttacccagtctgcggtattttgttctggcagctctagtgaactaatacagggaggtagaagaatcttcatgggttatgttttatgccagatggtgtgagaggctccttgcaggcattcgcctcagcacattttcacaacacttttaagcagtatagaaagatgtctgagctagtgggaaagagcttatctttgggagatgagtataaacttacaggttgaattgtgttcctccaaaaaggtatgttgaaatccaaaaacccaatgcctcagaatgtgatcttatttgacaataggatcattgcagatgtagtcaagttaagatgaagtcattagtgtgagtgttcatccaatatgactggtttcctcaaaaaacaagtagaaatttgaatgtagacatgtacaaaagaatgtcatgtgaagataaagggagaaaccggggtgatgtttccaccagcccagggatgtcagagattggcagcaaaccactgaagcttggagagagacatggaacagattcttcctcgcagccctttgaaagaaccaatcctgaaacagccctttgaaagaacaccttgatttttgacttctagtcgttagactatgaaacaatcagtttcttctgtttaagccactcagtttgtggtacttagttacagcagttctagggaaccaatacttgccttagttcctttttccttcatatttgagaaataaggatgcctgaatcctaactggcaatcatagagtgtttataaggttctctgagcattacttaccattgctattccaaacaatttttctcctctcttttgttctacttgtgatattatcacgcaacagtctagccagaaaggtcatttgtgatggattccccagcttgtatttctccatgcccaaagagttgctgggcagattaaaaaatatatgtgctcatttcagcatttacttaattttaattgttgctctgttttatttttccttcctccaagtcttccatctttctcttttcatctaaatactttttttctcttattggtttttattatttttctcacttatttttataaataaaataaatgcacaacaatttttattaattttgttcttccttcaaactatggccccaaataatttacttctcttcaaacataaacttctattcaagagcaaacttctttattcatttttctttttttcttttttttttgagatggagtcttgcttttgtagcccaggctggagtgcagtggtgcggtctcagctcactgcaacctccacctcccaggttcaagtgattctcctgcctcagcctaccaagtagctgggtttacaggcacccgccactacgccctgctaatttttgtatttttagtaggaacagggtttcaccctgttggccaggcaggtctcaaactcctgatctcaggtgatccacccgccttggcctctcaaagtgctgggattacaggtgtgagccactgtgccccgccaagagtaaacttctttaaatctctaaaattcttctcaccaagtccttccctaaactttaccccttaatccaactgggcctcattcttgcaccctattctcacctggaaagtgctctcgtagatgttcccaagttgaatcgaccttttgaagtcctcatcttacttgcatctgtgcattgttgaaaatttccttcttacatattctgtccgctcttggttatgtatgaagcaacatttcattttgcttaattggctagctctactcaatattataaggaaatttcttttttttttttttaaccctaaaccctgaggttttccaggtgtcaatcaataactgaaggatctgaggttttactttattcgcaagttaatctgctacagtttcttatgactcctgggtaagagacaaagaatcattttactcacaacagtggcagccagagaatttagcatttgcatcattttccaagctccagttcccagaaggttacctgaagagagccagatgaggccaacacattcagtaagttgtgttattgaagaggaaccttgaggttagagtaagcaaatttttttatctcaattttattagtaaaaacatgcagagaaaaatttctagaataattataagaaaatgttaatattaattatctttcgggggaaacataatgaaatttcagaataataataaaaggtttctaagacctacagatgacaattccttctgagcaatgttgaatacaacacactaccagaaaggaattggacaaaccacaggagtgtgctgcctaaaagaggacctttgcattcaacttggtcattcctttactcgaaaatcccatttcgtattctatcattttattgctgtttttgcctataaataccaccaaatacactagtggatatcagcttttaaaaataattttccaacaatgtcattggtaattgttatacttttatagtccattgattgagaatatacatatataaagtctgtatagtgtccagggatataaggggattatatatatatatgtggaatatatatatatatatatggattatttgatccctggacactgtacctgctctatgacccatgcgtccaagagtggtttgggaactgctattctatatcttttagtgtttgatacataaagttgacttagtacattgtgcaatgacaaagatggtggtaaaattactttttcctaaaacagtgactactaaaatttacaactacaaaatatgttctacggcttagaacatactttttatttttaaattttttgtaaagacagagtcttgctgtgttgcccaggctggtctcaaactcctgggctcaagtgatcgtccctcctcagcctcccaaagtgctgagattacagacatgagcctctgcaccagcccaaacttttcttttcctccctctctccctccctcacttcttcctcccttcccttccttttctttccctccttttctttcccttcccttcccttcccttcccttcccttcccttccctccccccccccacccatttcctttgctttcctgtttgttctttttgttcttttcttttctttcgttctctggctagtctggaactcctgggctacaaattgggtatactgctcaggtgatgggtgcaccaaaatctcacacatcaccactaaagaacttactcatgtaaccaaacaccacctgttccccagaaacctatggaaaaaaaactttttttaaaaaagttctccttgtgttaattttaagtagaaaaataacattaatgtattgagtctactttgagctgcaactttgaagacaaaagagcaagttctaaagctaatttcttttcttctgtattctctagatccatgtttcaaaaagagggatttcacaaaattcaccagcagtccttaggattacattggtactgaagtatagctagggaaaaaaaaaagtaaaattggagatgagataaaactgtactaagttcgagagtaagcaaatatttcataatgggcattaagcctgcctgccttttgctcagcaggaaggcattattttaattacactgggcaataaacaaatcttcttatcttctctaatctccaagcttgttcactataaaaacatcattgaaaagatcagaataaacgctgttagtgcttctatagatatgcagaaaccaagacacccatgtagaactgactcccaatcaaagaagtgcgttacataccccgtcctccacatgtccttcctggatgacctcaactccccataacttcaactactgcttgtaccctagtgacttctaaatctgtctctctcaactctaagtaactatggaaacttgggtgctataaccaaaatagtattatagtatcctttttttttttgtttactccaattatgttctcttcctgcattactcagttcagtaagtcttgtcaatatttatttgttattctaaactagtaaatcgcagatattatttgaatatttgtttcttatactaagtcattaaagccctgttgattttcttgaatatatatattttttcaatttttactcctcttgcccatttctgtctcagtccagaccctcaaaatcctactcttcctactttggactataactacagcatttttttttttttttttttgagaggtagtctcaccctgtcccccaggctggagtacaatggtgcagtgcagctcactgcaacctctgctttccgggttcaaatgattctcccgccacagcctccggagtagctaggactacaggtgcatgccaccacacctggctaatttttgtatttttagtagagatgggttttcactatggtggccaggctggtctcgaacccctgacctcatgatccgcccacctcagcctcccaaagtgctaggattacaggcatgagtcaccgcacccggccagctacagctctttcagttggtctccctgtttctatgatcaccccttcagttctaccctctacatgattccctatgtgatttttctaagagacaattatttcatttctaccctctacacagctccccacgtgatttttctaagagacaattatttcatttcaggctcagaaaacttaattctcctatcaatagtacttagaatttcccctgaactccaaggtgcagatggattcctagccaagtagaaagtgattatacatttctatttcatttctatttctattacatttctatttctattacatttctatttcattctatttccataaatcatacatgcctatattttatgtaatatttaatattcgaattaagttttacacttaccaatacatactacaaatatcacaaccgtcttcaaatatcaggcttacttttgtcttaatctttccactctgctggtctgtgcattgtaaaaattttgttatgggctttataaataaagttctttcagttcttttatagaatagtgtagtaacctatttaaataaatcttttttaaatagtttgcattacagaagtatatggctgagctgctagcagatcttaacattcttaattctaaaactattaatagtaaatgtaaaaaatatataattctgattaaaaacaacgttcttaattctaaaactattaatagtaaacataaaaatatataattctgattaaaaacaacgttaattctaaaactattaatagtaatcataaaaatatataattctgattgaaaaacaattttaaacatctctctttagttgaaagctctccctccttatggcttcaatgtgaattctgtcacaatgcacttagtgatgagcattaaaaagcccacttataatttgtcattagaaattatagtgagaaatattttttaagacacaatgctagttacatggatgaagccctctcccatccctcccctttgttataaaggagttgacattatcaagtgcaagggcttcagatttaagacgggaatttaggagaagactctagttaaaataagtatttgaagttatattgaatataggaatttcaataaagagaaattttgatgttattgcaatgagagtaaaattaaactgtagggtacagtcctaattttgtgtatgtgtagtaacaattctgcaagtattaagagaaataacttgttatttaagataaaaaaaaaacccatggatgaggtaatacaatctttactgaccatctagacacaagcttgttacaagaacataaccttggcagatggatctccaattgctgcatgtcaaaaagtcagtctgccacctcacctgagggtggagaacctcttataccaaatatacctataaaaaagttttcttttttctatattcaatggacttttaatttcaaactattttatattagagttcattacaatgacatttgaaaaatgttaatatctccatgtattttgatgtctcatttattattaaagtttatattttgatacataaaagctaagcctttggaaggcttcttatcaatgtgtaacttcttcagtaacaataacatttagataaggaatattttggagatgggaaatattacaaaccatctcagtgaatccttgtgacatttatctcatttataatgactttagtgggtgttgataatgaagtgtctattattaatactcctacataggaaaactttttgaaatagacaaaacgttagcaactttaatctggaatacaaggttagtactagcttaaaagtttttaaattaaggtgaaaatctgaaagtaatgccaggcaacaagttttaaaaatgacatccataaggtgaataaaaaattcagcagcaagtgaaattggttgcattttgagtagatttcagactgtagttttaccttaataaatacatcaattgcagtctttctgagtgattagctttaatcatcatccatcttttgcatcagtaatgtatggcatggcatgaagcctttttatacttctaatgattacattaaattgacttaaactttcaggaagattctatgagtttttctattttaaattattaacctgaaaaaaatttccaccttatctttttactgcatgaattctaatgattattcaaccggcattatttatctgaattaaaaagtgcaatattcacattgagatttcagttcattttttttctaaatctatctttcaggaaggaaaaaatagctaagaataaaaagattagctttatattttacctggcttacctcccaatctcagacacctcaaaatatataatgtgtttattagtgattaattatttttattaggtattcacaatcatttatgtaacttattacatactatgttattttcagactatatgtagattatatttatcttgatgtaatttaataaaataaactttatttttaaaaaacagttaaaaataaatttcataacatttagcttgggatagaaggtcattttttttcttataattctgattttgcatcacttagacatggaattaaacagatgtgtgagctgaaatgtcgaaagaatactttgattattttagtggctgagacatgaatctaatggattactgctgaataaattgctgagctattgacatcataatggctgatggaattgattatatagaaaatagccactgtttttctagtgattgagtgatggaaaagatctcattttgcctgtcagcctttatgaaattatccctggaaagaacaggctatgtgcatgtctgttagaacaatgagaattgctaaataacttctgacttagacacaagtcacttgtcacatgagcaaaatttaataacagactttaagcaatagtcttggatatggggcactctaagaatttctaaattagactgttattacttgctggtgtttgctgttctgaagaacattacacaggctttatgtaagtttcttttgaagacaaagtagtaatgtatatgaggtaataacatacatatcgagacattgctataaagaatagatgatatagagagggatggatgcattgtattttcccctgtgcttttaaaagttttcgcttgactaattgattcaaatacttgaagaggaacttgtggtgggctgtcctttttgatatgtttaaaatttcccctaaaattttttcttacttttttcttccacattctgttattaggttttctaagtttattttctatggaaaaagaattaagagaaaaattaatccactcctgggaaagactagaatatggaagtcttcaggctgagtcagagaaaatttcttttcaaagtttagattaaaaatgttgctgattgtggagactgagaagaaaaggagagagatttgaggagcccgtagaaagaatggggagttgatacatttgcagggacaatgactaaggaccagatgtaacgaaggatgtctgggcaggggccacagtagtttgataaagagatagttactaatggcctatttccaagccagcttctcaaacttaaatgtaatcacaaagaaaagggggtagtaaattgattgagtttgaaaaattaagatgtcttttttgatatttgaatttttgaatgtatattcagagtcacttctatttcagaatgacaacttctattatccactcagaaaatgcaggaaattcattctttaattataactacatggactaaagaatgctctcagcctcatgccaccttctttgggttgatggaacttctgagaaaatgggttatgagttatagagcgtcacgctttgccaacctctgaaaatgccaatattcatgtctgtggtttcaggcaaaaatattctagtactgtaattctagaaagagaacaaattagaaagattgctctgcaaatgtcaaaataaattccaagacatctctttccccatgtttaccatacaattccctgtgaccgtaattgaaactataaagtcagacactcttggattgacccttcatcaccactccttactacctatgggaacttgggcaagatacttaacctctcttggtctcagtttcattatatttaaaattaggattattatttgtatctcacaggttgtagtaagaatatacggaaaactggtacatggtatttaatcaatggtagctatttttataatgataacttccacattgctcatttccatcatctgcctgctaataggcactgttctattttgtgtccatctgtacatgatctctatgtctgcctttgctatggtctaaatgttattgtacccccaaaatgcatacaacaaaatcctgacctataagataatggcgttaggaggtggatatttgaaaggtgattaggtaacaggagcaggactgtcgtgagtaggattagtgcctttataaaagagtctctagagagatctctcctcttttctaccacccgaggacacagcaaaaagacagctgtttacaagtcaggacgtgagcccttcccagacactgaatctggaagcatctcgatcttggacttctcagcttccagaactgagaaagataaatttctgttgtttatatgccacctagtttatggcattttgttatagtagcctgcatggactaagacagagaactggtaccaagaagtgggggcactgccataacaaatacctaaaaatgtggaagtggctttggaataggataatggatagagattggaagagttgtgaagtgcatgctagaacaaacttcttagagaatacctgaacagatgttggtagaaatatggaaggtaaaggccatgctgatgagatctcaaatggaaatgaggaacatgttattggaggaaagaccatcttgttgtgaagtggcaaaaaactttgttcaaattgtgttcatgtccaagtattttgtagaagatagaacttgtgtaagatgaaattggatatttgagaaaatatctaagcaaaatgttgaaggtatggcttggcttctcttgatggcttttagtaaaaggcaagaagagaaaaatgatttaaagatgaagttgtttattaaaaaagaagcagaacttgaagatttggaatattctgagcctattcattctgaaaagaatgagagagcctatctgggagagaacacaaaggatgtggtcaagattaactgatagggagattagttagttatttaaacagaagccaggaactattgtctaagacaatagaagaatgatccagagtcaatttgcattacaggtctagggtgcaagagccccagcaagggtggagccactggagagagccctcattagggcaatgcctagtggattcatggggccagggccacttttgtgatctcagacaggtagagccaccaaagtgaaattccatccccagggagctgtggtctccagacagaggaacagagctgccacacagattgggccacttcagagaactgctacaagaatgggaccacctaaagttgtgggattagggttgtttggaaccttggcggcctatttactgacctgaaaagctgttggggagccaccccagtggggccagaatgtgagactcctggctcagtgagtctggaaggcaggattcccacctcagtgtgcatggagggtagagcattaagtcaaagaataccttcaaaccctaaggctttggagctacttgggatctgtcactcatttcttctttcctattttcccttttggaatgggattgtctgtcctgtgcctgtcacaccattgtttcttggaaatgtataacttctttgatttcataagtttgcaggtgaatgggaatttgcctcctgaggcaaatcataccttaagtctcacccatatctgatttaagtaatatttatatgagactttggactttagacttttgagttaatgctggagcaagttaagattttggagctattgggatgggatgaatatattttgcaggattgaaggatataaattttgggggccaagggacagagggctatggtccaaatgtttgtgtccctctaaaatttatatgtagaaatccttacctctaaggtgattgtattaggaggtggaatctttgggaagtaattaggtcatggggatgaagctttcacggatgagattagtgcccttacaatagagactccagagagctcctttgcccattttgcaatgtgaggacacattgaaagagtgtgaaagagtgctgtttaggacgcaaaccctcaccaaacgctgaatctgccaacaccttgatcttggacttccaagcctcccgaattgtgagaaataaatttctgtgtttctaagccactaagtctatgatatttttgtagcagtctgaatggactattggaataagacaaccttattaccatcatcagtaatcaactttctccttcttttcccaacccctgctagggatggactctgccatatgttatgtacaatggccttgaagaagaaggggagatttaagagtaatttcagtataacgtgtggttagaagtatggacttgagtcaaactattgggtttataattcagggtctgccatttacacgatatctctttctctggataagtggattattctttctgtgcctagccttcttcatttgtaaaacggtgtattagtctgttctcatgctgctaataaagacatacccaagactgggtaatgagactgggtaatttataaaggaaagagggttgagggactcacagttccacatggctggggagggctcacaatcatggcaaaaggcaaaggagaaggaaaggcacctcctatatggcagcaggcaagaaagtgtgtgcaggggaactcccctttataaaaccatcagatcttgtgagacgtattcactatcacaagaacatcatgggaaaacctgtccccatgattaaattatctctcaccaggtccctcccacgacatgtggggattatgggagctacaattcaagatgaaatttgagtggggacacagctaaaccatgtcaaatggtttagaatattaaatgtactaaaaagcagttaacagatattattgcagatacatcgacttttgaattaatctttcttttctcatacttagaacttatttcatttctgtttatatttttatcagttaatattccctatatggctatgagtttctcaaagataagaatgccttattcatgtaacacaaatgaccatagatttccactcttctttactacatattacttgcttagtggtgttttgttgtcatttatattcttttttacatattagggagtttatggatgttgtctcatttagttctcaaagagctttatgagctaggtaatattttccacaactcaagaagaaatggaggctcagaaatgtaggtaacttgtctaaggtcctacagctaacatgaatcagacacaagatttgcacccagtttgaatcacagcccatgttcatatccactatgctacatggcttctttttatttgtttatttgcatatatttaggaggtataagtgcagatttcttacttgcatatattgtatagtggtaaagcctgggcttttagtatacccatcacctaaatagtgaatattgtacccaataggtatttattttaaccctcatttccctccaaaccttttgtggactccagtgtctattattcttctctgtatgtccatgtgtactgattgtttagctcccatttataagtgagaacatgtggtctttaactttctgtctgagttatttcacttaagagaatgacttctagttccaactttgttgctgcaaaaacacatgattttatttttcttatgccataaaacacatgattttacggtatatatataccatagaatattatatatatatcacagatatataccatagaatattatatatatatcacatatatataccatagaatattatatatcacacatataccatagaatattatatatatatcacatatatataccatattaccatagaatatatgtatcacacatatataccatagaatattatatatataccatatgtatgtgataaatataaaacttgtatatatacacacatataccatagaatattatatataatcacatatatataccatatgtatatcacattttctttatacaatcatctgttaatggacactttagttgattctgtgactttactattatgaatagtgctgtgacaaaccatacaagggcaggtatctttctgatgtaataatacctactcgtgtatgcttatcacagtactattcacaatagcaaaataatagaatttgctataatcacaatagcaaaataatagaatttgctataatcctacacagtagtgggattgctagattgaatggcagtcctatattcagttctttaagacatagtcatactgtttttcataaatttgctactaatttacattcttaccaacagtgtataagcattctctttttctctgcatccctgccaacatctattgttttctgactttttaatgacagccattctgaccggtctaagatggtatctcttgtggttttgacttgcatttctctgttgattagttatgttgagccctttttcatgtttgttagctgcttatatgtcttcttttgaaaattattagttcatgttctttgctccctttttaattgggttatttgtttatttcttgttgaactatttgagttctttgtagattctgaatattagccctttgttggacgcatagtttgtaaatatcttcttccattctgtagcttttctgtttgttctgttgattgttttgcttgtcagaagcttttaggtttaattaagtctcatttgtttatcttcatttttgtagcatttgtttttgaagacttggttataaatattttgccaaggccaatgtccagaagagttcttcccagattttcttcaaggatattgatagtttcaagttctatatttaggtctttaattaatcttgagttgatttttgtatatggtgagaggtatgggttcaagtttattcttctgcagatggttatccaactttcccggcatcatttattgaatagaatgttctttcctgagcatatatttttgttgacttcatcaaagatcagttggttgtaggtatgtggctctatttctgggttctccattgtgttccattgatctatgtgactatttttatttttatactagtaccttctgttttagtcactatagcttagtagtataatttgaagtcaggtaatataatgcctccagcattgttctttttgcttaggattgctttgactatttaagctcttttttggttccatattaattttatgatttattcccctaattctgtgaaaaatgacattggtaactcgatagggattgccttgaatctatgaattgctttgggcagtatggtcattttaactacatttatccttgcaatctatgagcatgggatgttttcccatttgtttatgtcatctgcaatttattttactagtgttttatagttctccttatagagatactttacctcctttgttaaatatattcctagctattttatttgttttataactagtgtaaatggaattgccttcggattttgtcgttggctggatcattattagtgtatagaaatgccactgatttctgtacatagtttcatgtcctgaaactactcaattcatttatcaaatctaagagttttttggtggagtctccagatgttactagatataagatcatatatcatcagtgaacaaggatcatttgacttactcttttccaatttggatgctttttacttttatttttttcttgcctgattactccagtgagaacttacagtactatgttgaataagagtggtgaaagtggggctgggtgcggtggctcacatctgtaatcccagcaatttgggaggctgagatgggtggatcacctgaggtcaggagttcaagaccagcctggccaacatggtaaaaccctgtctcaactaaaagtacaaaaattagccaggcatggtgatgcgtgcctgtaatcccagctgcttgggaggctgaggcaagagaatcgcttgaacccaggaggcggaggttgcagtgagctgagattgtaccattgcactccagcctgggcaagaagagagaaactccatctcaaaaagaaaaaaaaaaaaaagagggtgaaagtgggcatcttctcttgttccagttcttagagggaatgcttttaacttttctcgttaagtatgatgttggctgtgggtttgtcatatattgccttttttacattgagatatgtttcttctgtggctagtttgttgaggaattttatcacaaagcaatgctgaattttatttactactttttctgcatctattgagatgatcatttggtttttgtcctcaaccctgtttatataatgtatcacatttattgatttgcatatgtttaaccatccgtacatctctggaataaatcccacctgatcctggtgatatgttttgactctgtgtccccacccaaatctcatctgaatttgtaattcccatgtgtcagggaagggccctggtgggagatgattgaatcgtgggagcagacttctcctttgctgttcttgtattagtgagttctcacaagatctggttgtttcaaagtgtgtggcacttcccccttcactccctctttctctcctgctatgccatggtaagacatgcttacttccccttcaccttctcccttgattgtaaatttcctgaggcttcccagtcatgcttcccattaagcctgtggaactgtgagtcaattaaacctcctttcttcacaaattacccagtctcaggtagttctttatagaagtgtgaaaattgactaatacagaaaattggtgcccaagtgacctattgctataaagatactgaaaatgtggaagtgactttggaagtgggtaatgggtagaggttgcaagagtttagagggttaagataggaagatgggggaaagtttggaagttcctaaagacttgttgagtggttatgaccaaaatgctgatagtgatatgaacagtgaagtccaggctgaagtggtctcaaatggagataagaaacctattgagaactgtagtaaaggtcactcttgctatgctttagcaaagagactggtggcattttgctcctgctgtagaaatctatggaactttgaacttgagagagagaatttaaggtatctggcagaagaaatttcgaagtggcaaagcattcaagatgtggcctggctgctcctaacagtgtacagtcatatgtattcacaaagagatggtctgaaattgaaacttacatttcaaaaggaagcagagtataaaagtttgaaaaatttgcagcctgaccatgtaggaggaaaaaaaaaaaaaaacttttctgaagagaaattcaagccactggctgcaaaaatttgcgttagtaaaaatgaaccaaatgttaattgccaagacaatggagaaaatgtctccagggcatatcagagatcttgacagcagtccatcttatcacaggtccagaggcctaggaggaaaaaattgtttcatgggctgggcccagggccttgctgctctttgcagtcttgggacatggcaccctgtatccaagccactccagctccagccatggctgttgcttcagagggtgcaagccccaagccttggcagcttccatgtggtgttgggcctgtgggtgcacagaaggcaagaatttgggaacctctgcctagattttagaggatgtacggaaaagcctgtatgtccaggcagaagtctactgcaggggtagaaccttcatggagagcctctgctagggcagtctggaatgaaaatgtggggttaaagcccccacagattccccactggcacactgcctagtggagctgtgagaagagggccactgtcctccagaacccagaatggtagatccaccaacagcttgcaccatgggcctggaaaagcctcagtcactcaacaccaacccatgaaagcagccaggaggggggctgtacactgaaaagccacatgcgcagagcttcccaagaccatgagaacccatctgttacatcagtgtgccctggatgtgagacatggagtccaaggagattattctggagctttaatatttaatgactgccctgctgggctttggacttgcatggggcatgtggccctttgttttgaccagttcctcctatttgaaatgcaagcatttatccaatgcctgtattcccattgtatcatggaattaactaactagcttttgattttataggctcatggacagaagggacttgccttgcctcaggttagactttggacttggacatttaggttaatgctggaatgagttaagactttgggagactgctggaaagacatgactgcattttgaaatgtgagaagaacatgagatttgggagaggcaatgtggtttcgctctgtgtccccactcaaatctcatcttgaattgtaatccacatgtgtcaggaaaggggcttggtgctaggtgattaaatcatgggggtggactttccccttactgttcttgtgataatgagtgagttgtcatgagatatggttatttgaaagtgtgtggcacagctcctttctctaactttctcttgctctctcatggtaaaatatgcttctttccctttcatcttctaccatgattgtaagttacctgaggcttcccagtcatgcttcctgttaaacctgtgagttatttgttatttttttcccttcaaactataggtttagttcttgttttttgtagttccttgaaatgtgatgttaggtttttaattactgatctttctacttttttgacgtaggtatttaatgctaaaaacgtcccttttagcactgcttttgctgtatcccacaggtgttggtatattgtgttgtcaatttaactcacagagaaaaattttaaaatttgcagcctaatttcttcattgacccagtgatcattcaggaaaataatgcttaatttctatgtatttgtatagtttgtgaaggtcttcattgtattgatttctggctttattccactgtggtctgagaagatatttgatacaattttgattttaaaaaaaaactttaagacttgttttatggcctaatacatggtctatcttggagaatgttccatgtgctgatgagaagaatgtgtattctgtagttgttggatataattttctgtaaatgtctgttaagtttatttagtctaaaatccaatctaagcctaatgcttacttgcttattttttgtctcgatgatctgtctagtgctatgagagaggtgttaaagtcccccactattattgtattgctatctcttttgttaggtctagtaatagtgtgtgtgtgtgtgtgtgtgtgtgtgtgtgtgtgtgtgtgaatctgagtgctccaatgttgggtgcatgtacacttagaattattagaatctgtttttggattgatcactttgtcattatataatgatcttcttttttatttttttaatttaaaatgttctatttatttaaatataggtagtcctgtttgcttttggtttccatttgtgtggaatatctttttccacccctttacttttagtttatatgtgtctttacaggtaaggtaaatttcttgtaggcagcatatagttagatcatgtttttttgattcatcttccaatctgtatcttttaagtggagaatttaatccatttacattcaaggttaatattaacaggtgaggctttgtttctgtcatattgctaattattttaaagttgttttataaattcatttcttttttctgtctttttgtctttgtggtttgatgaaattctatcttattgacatttgattcttttccttctttgtgtgattgtattatgaatattgtgagttttatattttcatgtgtttttatgatggtgaatagcaacctttcatttccatgtttaagacgcctctgagcatttcttctaggtctggtctagtgctgacaaattccttcagcatttgttggtatgggaaagactttatttcatttatgaagctttatttggcaagatacgcaattcttggtggacagtttttacttccaacaatttgaaaatgtcattccattctcttctagcctggaggttttctgctaaaaagtccactgttagtctgatgggatttcctttataggtgactatatgcttttctctttttaattttaaaaatcttttattcactttgactttagacatttcaaatatagtatgctgtggtgaattccttttagaatatatttgactggggattggtgggccttctatgtctggatttctgactctcttgcaagacatgggaagttttcattgattattttcttaaatagattttctgagctttttattctctctttcccctagggaatatcaataatttgtaactctgattgttttatgtgattccagatgtcttgaagactttgttcttttttttttttttttttttttttttgcctgcttggattagttttaaaaaaactgtctttaagttctgagattatttcttcttcttgctctggtctataattaaagcttttgaatgtcttttgtatttctttcaatgaatttatttccagaatttctgcttttgttttcctaaagttatctatcttcttggtaaatttcttacttatattctgaattgattttctgatttctttgtattggttttcagatttctcttgcatctgattgagctccttttaaatcaatattttaaatttttatctggcatttcaaggaattctttttaaacggaatatgttgctaaataatcattgtagtcctttggtagtgtcatatttctctttttttcatgttttctgtattcttccattgatatctgtgcatctggtatagcagttacaagttttaattgtagggcagaattttttcctgaaaatgtacatatgttgttgattcagtagtatactttggctttaattttgtgtgacttatgatagtataatctttgtatgactactttggttgtacacagggtcagtggtatctgtaatttcttcagtggtttagggtacagttattagatgaggttgtggtgaagtttttctgggaactttatcaccaactgacccagtcttttggccccagtggtggaagcagttgggcaaatgtgtctgtttttcggccccagagcagcaaccactaacacactggctctggtgttagtggcttctgaagggctgattcttgggcctccagatagcttgcttataagccagtagtgaaagtggtgagccaagtgtgtgggtgggttctcagacccttgggcagctggtgtcatgcaggtgattgcagtggcagtggttagagcaatccagtgggacccaagcagtccatgtgggtgttcctggtagctgtgataggttgggtgagctagtccccaatcctacagtggcctatggcagagcactgggtattgttctaagtgtgcttatgagagcttggtcttccctgtcgatcccccagctgggtggtggcctcagctgcatcaccttgaacttggcccatgttaaaatggtgccagtcatggacttgtgaccagagagggccccacactcaggtgagcagcctgggtaagaagctgtataagcagtgtggtctgctcaaatatcagtttcacaggagcccatagcagggaaatggatattgtctgaggtactcataggagagtccactttccttgcccctctttggctgggtggtggctgctgctgcatcaccctgaactcagtctgagggtgaggtgcagcccagtgttaaactctgaaaatggcaccttgggcatgtgacaagagatggaaaggcccctcaagcaagcaggggggcacgaagctgtggggaatgtagtccatttgcatctcagtctcacggcagcccattgcagggcagtgaatattgtcctagatatatgcataggagagctgggccccctgtccttccttggctaagtgggagctgcagacatgtcagcttaaactcagcctgagggtagagggcagcctggaattaaactctcaaaatgacacctcgaggggcagggatcctcccaggtaagcagtgtgggaagaagttttgtggaatgtggcctgctcacaactcagtctcacagcagcctattgcagggtattatcctagatgtgtttaggagggcctgtgtgttaatccattctcctactactacaaagacatacctgagactgggtagtttatggagaaaagaggtttaattgactcatagttttgcaggctgtacaggaggcttggctgcagaggcctcaggaaacttagaatcatggcagaaggggaagaggaaggaggcacgatcttcacatgatggagcaggagagagaggacaagcgaagggggaagtgctatacactttaaaccagatcttatgagaactcactcactatcatgagaacagtaaggggtatgttcacccccaggatccagtcacctaccaggcccctcctccaacagtgatgattacaatttatcatgagatttgggcagtgacacgagccaaaccatatcagcctggtttccctgaggaccggagagggtgaggtctctcctaggcatgtagtatgggcaagaagatgtgggaagtgcagtcttctcatgtctcagtctcaacagcagctcatatcagggcagcagggtcacttccaggggtgtgtgagagtctcactctccctcgttggagcagtgcagtggtcacagccatgtctgtagatcctgatatctagcctttcaaaattgcaccctgctgaggctgctctaggtctgggtgcccatgggattctctgtgggctccctttctggagcaacatctgtgtgcaatctttaggcaacaccatgtgtcagacccagtgggtcaagggtttttcttgtacccaagatcataaaagccaagccctgtggttttctctcttactgtttccctgcatctaggaatctctcctggctatctgtcaatttccagatgggcaagctgcctcaaacccttcccttacttctgttgatttccatctcttctctggtgaatgttagcattctctcatagacaatctgtttgaaatgtgagtatctacttactattctgattcttctccatggaggaggcacatactacctgcatccagtaagccaccttgatccaaaatctggcttctttttgctattgtacaggagcagcaatggatttgtcaaagtgactagattgccagtgagttaaatacgcatgactgaaaatcagcactccttacctagcctgttctcagtaaggtctcggttctcagtaaagtctgccaaatgggttaatttatattagaggaggctgcacctgctcatcccatctcatgtgcattcacctcctcctgatgggtactctcttttccaactttccatggccacctttgcctgaagattcagctataaatcctttttcaaacttgacaagcacagcctttcaaaacataaccctaacttattttaccaatcttgttgctcacataactctgtattatgtgctttagctagtaaataatttgatgcttccttttcaaatcttttgtttatcctgttcttacagttagcagtttcctctctctagctatcctgcctcttctctcttatctttcttttattttctcgttatttttgaatatatagatattatttattaatttatctgttttcttcagcttcataacatttatgtgtcatttataaactttagaactttgttagaagtttaatttctcttctgtttttatagtgagtagagagaattattttcacatttatattgctctaaatcatgctagccaaggaataatttatctcattaatttataacaaaatctgtttgtcacagcatgtgaaatatgaaaacaccatatagaattacacagtatattctgttttctaaataaacatatggatgcattttattttacaacttgaattatattatctctattacttattcaaggatatggaataatttttactttctgcttcaagactacagattgagctcatgaggtgcatatcttttctttctgagacaccattaaaatgacaataaagaaataaaaagcttttaaacttacaacaaagaagaggataggagaattctacaggaaacaggatatttcaacacacttattgcaaatagaaatgagatagatgagtttatcttgataagccaaagcacaggaagcttccactgtaaatatttatgaaaagttttatagcggaagagggttacagactaagagattgcaagataaatgaatagcaagagtgaaaaatgagtcctaaaatagtggcattaattggtggttttctggggtcatgatgaaagtactcaacaactgatacaataaacaatattaattagtcagctggatattcacaagaaacatcaaacaataaccctatcagtgcatactgactaattacaactcttgtatgcttagacatgtaacagtttacttgagcatagaatggctagaagcttagtattttaccctggccaaacaaacagaaagacaaaaacataaaacatgggcaaaacccaaaaccagtagatatttcttctttacagtaatgttaggagctgaataggggtacctagagtggataatatgtcttttgtctatttaggagaccctggttctgtgccaaggatgcctatttatagtggatccaagagcctgctggtcaagaagccctgccagggtgctaaaaacattaggcatttgagaaaggcttgaaacataaaagagaaagatgaagatgattgaacaggataaccatgtcctaggggaaatagagatatttcaggtaatagaagataacttaaaaaatatttcagttgagaagttcaaaataattgaaatatattacatccctaaaataacaacagtgtgcaaagaaattcagaaaagaatctaaactaaagtggaggaagtctgccacagagagaatgaaagaggaatatagaaaatatgaaaaggaaaataaaaaaatgtagagtataactttaagagtttcagaaacttgctattataatttccagaaaaaaaaaaaaaaaaaaaactaaggcaggttacagtatattaaagctataggggcacagcaagatggcagagtagaagcctacattgtatgtctccactgatggaacaccaaattttaacaactatctgcacacagtaaagcaccaccacaagaaccccaaatcaggtgagcagtcacaggacctggttttaacttcatatcattaaaaaagacattgaggacaaaacaggcatcttgaatcacagaaaccaccacttctccatttcctggcagtgaccgtctggcctgcagagagactctgctcactttggggagggaaagcacagcacctgggggactttgcattgatctcaatgtttccctgtcacagcagagaataaagccatgcttggcttagccagtccccacatacagagggaacatttggaccagccctagctagaggtaattgcccatcccagcaattggaacttcagtttctcagcaagccttggcaccatgagctgaagtgctctgggatcccaggtaaacctgaaaagcagtcgaggacacgtaggacacaaggactgcaatgactaggcaactcagtgctaggctgggcttagagccagtgaactaaggtggcacgtgacctagggagactccagtaggtatggttaaggaagggcttgcaccgtctttccctcaaccccaggcagtacagcttatagcaatgaaagtgactcccttgcttctgcttaaggagaggagagcaaagtgtatggaggactttgtcttgtctctttaggtaccagtgcagccacagtaggatagggcactgagcagactcatgagcccccctctccaaaccctagctcccagacaacgtgcatcttagataccacctcaaccacagtgaggtagagaaacaagctgggcatttgggtcctcaaattcaggcctagactcgtggacaacatttctgatcctgtcctgggcaagaaaggagcccactgccctgaagagtgagtcccaggcagcattcaccacaagctgatgaaagagcccttgggctttaagcaaacattgccagtagcctggcagaatgccccgtggaccagtagtggtggtgatggccacagggagaggctcctctgcctgtggaaaggggaaggaaaagtgggaaggactttgtattgtggtttgagtgccagcttagctacagtagaatagagcaactggtaaattgcggatatttttgacttcaatctctggctcccaggcagcatctctggacacattcaggccctgggggaaattgccatcctgaagagaagggccttgggcaaggtccagtgctgtgctggtttcaggtctaagccagagcagttccaatgttggtggccacggaaatgcttacatcatcacacccccagttccaagtggctcagtagatggagaatctatatgtttgtgagaaagtaaggggaaaaaaaaatcccaaagtctctgcctggtaatccagagaattcctttgagtcttatgcaagaccaccaaggtggtacctctgtgaatgtgcaaaaaccacagcattattaggcttggggcctaagtccccttaaatacttggaaagccttcccaagaaagacaggcacaaacaagccccgactgtgaagactaccataaatagctaactcttcaatacccagacaatgaagaatatatacaagtatcaaaaccatccaggaaaacaagacctcaccaaatgatctaaataaggcaccagggactaattctggtaaaacagagatatctggcctttcagacagagaattcaaaatagctgtgttgaggaaacttgaagataacacagaaaatgaattcaggattctatcagatacagttaaaaagattgaaataattaaaaagaatcaagaaggaattctagagttaaaaaatgcaattgacattcccaagaaggcatgccttttagtagcagaatagattatgcagaagaaagagagtgaacttgaagacaggctatttgaaaatacaaagtcagaggagacaaagaaaaaagaatacaaaacagtaaagctcacctgtaagatctagaaaatagcctcaaaaggtcaaaccatagagttcttggccttaaggcctcttcttctttaaagaagaggtaaagaaagagatggggtgggaaatttattcaaagggataataacagaaaactccccaaacctagagaaagatatcaacattcaagtacgagaaggttatagaacaccaagcagattgatcccaaagaagactacatataggaatttaatcaaaccccaaaggtcaagtatcaaaaagggatcctaaaagcagcaagagaaaagaaacaaataacatacaatggtgcttcaacgcatctggtagcagacttttcaatagaaaccttacaggccaggagagagtggcatgacatatttaaagttatgaaagaaaaaacactcttaccctagaataatgtattaagtgaaatatcctttaagcatgaatgaggtgtaaagaccttcccaggcaaacaaaagctgaaggattttatcaacaccagacctgtcctacaagaaatctaaagggagttctttaatctgaaagaaaagaatgataatgagtaagaagaaatcatttaaagatacaaaagtcctggtaataataaacacacagaaaaccacagaatagtataatactgtagttgtggtatgtaaatttctcttaagtagaaagaataaattatgaaccaatcaaaaagaataactacaacacattttcaataagtagacagtacaatgagatataaagataagcaataacaaaattaaaatgcaagaaaataaagttagagttttattagttttctttttgcatgtttgtttatgcaatcagtgttaagttgtcatcagtttaaaataatagattatatgacagtatttggaagtcttgtagtaacatcaaattgaaaatcatacaatggatacacaaaaaataaaaagcaagaaattaaagcataccaccagagaaaatcaccttcactaaaagacaggaaggaaggaaagaagaaagagacgactgggaaacaacctgaaaacacataacaaatggcaggagtaattccctacttatcaataataacattgcatgtaaatggactaaactctccaataaaaagacatacacttgctgaatggaagatccaatgatctatgcttacaggaaacacacttcacctataaagatacacatagactgaaaataaagacatggaaaaaagatattctattccaatggaaacaaaaaaagcaatagtgttatacttattcagacaaaacagatttcaagacaaaaactgtaagaagagacaaaaaaggtcactatataatgataaaaggatcaattcagcaacagaatataacaactttaaatatatatgcaccaaacactggagcacccagatatataaaacaaatattatagctaaagagagagatatatctcaatacaataatagctagagacttcaacacctacattccacattggacagatctagacagaaaataacaaagaagctttggacttaatctgcactatagaacaaattggcctaagagatatttacagaacattttatccaatggctacagaatacacattcttctcctcagcacgtagattattctcaaggataaaccatatgttaggtcacaaaacaagtgtcaaaacattcaaaaattgaaataagcatcttctctaacgataatggaataaaactagacaccaataaagaggaattttggaaatgatgaaaacacatgaaaattaaacaatatgcttctgaataaccagggggtcaatgaataaattaagaaggaaatcgaaaactttctggtaacaaattataatggaaacacaacataccaaaacctatgggatacagcaaaagcagtactaagagaaatttatagctataaatgtctacatcaaaaaaaaaaaaaaagcttaaataacctaatagcacatcttaataaactggaaaaacaagagggaaccaaacacaaaattagtaacagaaaaaaataataaccaggggtggtgtctcactcctctaatcccagcactttgagaggctgaagcaggcagatctcctgaggttaggagttcaagaccaggctggccaaaatggtgaaaccccatctctactaaaaataaaaaaattagctgggtgtggtgatgcatgcctgtagccccagctactcaggaggctgaggcaggagaatcacttgaacctgggaagcagaggttgcagtgagtcaagatcacaccactgcactctagcctggatgacagattgagactttgtctcaaaaaaaaaaaagaaggaaagaaaaataataaaagagcataaataaataaatttgaaatgaagaaaacaatacaaaagatcaatggaccaaaaatttggctttttgaaagttaaacaaaattgacaaacctttagacagacaaactgagagaaaaggagagaagatccaaatatataaaatcagagatgagaaaggagacattacagctgataccacagaaattcaaagaatcattaatggctacattgagcaactatatgccagtatatttaaaaaaactaaaagaaatgggtaaattccctgacagctataacctattaagattgaaccattaagaaatccaaaacctgaacataccaataacaagtaatgagattgaacccatattaaaatgtctttcagtaaagtaagcctaggacccaatggcttcactgtgaatcctatcaaacatttaaagaaaagctaataccagtcctactcaaacattctgaaaaatagagaaagagggagtatttccaaactcattctacaaggccagtattatcctaataccaaaagcagacaagacagattcaaaaaagaaaactgtaggccaatatctctgatgaatattaatgcaatgattctcaagaaaatactagcaaactgaatccaacaatactttgtaaagattatttatcatgacccagtgggatttatcccagggatgcaaggatggttcaacatatgcgaaacaatgaatgtaatatatcatctcaagagaatgaggaacaaaaaccatatgatcgtttcagttgatactaaaacagaatctgataaagtttaataccctttcatgataaatgtttcgggaagtcagggaccctgaatggagggactggctgaagctgcagcagaagaacataaattgtgaagatttcatggacattaattagttccccaaattaatacttttataatttcttacgactgtctttactgcaatctctgaacataaattgtgaagatttcatggacattgatcacttccccaatcaatactcttgtaatttcctatccctgtctttaatctcttaatcctgtcatcttaagctaaggatgtatgtcacctcaggaccctgtgatgattgtgttatctgtacaaattgtttgtaaaacgtgtgtttgaacaatatgaaatctgggcattctaaaaaagaacaggataatacgattttcagggaacaagggagataaccatgaggtctgactgcctgcggggccgggcagaacagagtcatatttctcttcttgcagaaagcgaataggagaaatattgctgaattattttcccagcaaggaataaccctgggaaaggaatgtattcccaggggaggtctataaatggccactctgggagtgtctgtcttatgtggttgaagataagggatgaaatatgccctggtctcctgcagtgccctcaggcttgctaggattaggaaattccagactggtgaattctagtcagaccggttgtctgctctcaaaccctgtttcctgttaagatgtttatcagtgacaatgcttgcccagtgggacatgaaacctcatcagtaattctaattttgctctggccttgtgatcttgctctgccatttgccttgtgatcttttattgccttttgaagcatgtgatctctgtgacccactctctattcgttcactccctccccttctaaaatccctaataaaaactcactggttttgcagctccaggtggtcctaccaatatgtgatggcaccctcggaggcccagctataaaatttctctgtttgtgctctttctctttatttctcagacctgccgacacttagcgaaaatagaaaagaacccacgttgaaatattgggggctggttcccctgatagattaaaaaccctaaaaaattgggtatagaaggaatatatctcaacataatcaaagctgtatatgacagacccaaagctagtatcatattgcaagaggaaaaataaaaagccatttctttcaaatctagaacatgacaaggatgccttctttcataactgttatttaagacagtactggaagtcttagctagaacaatcagacaagagaaaggaatacagggcactcaaattgaaaaggaaaaagtcaaatcatccttgtttgcagatgatataatcttatatttggaaaaacctaaagaatccacaagaaaactattaaaactggtaaaacaaattgagtaaagttgcaggatataaaatcaatacacaaaaatcattagcatttctacatgccaacagtgaacaaactgaaaaacagaaataaaaaggtaatcccatttacaatagccacaaataaaattaaatacctaggaattagccatgaaagtgaaagatctttacaaatgaaacgtataaaacactgatgaaagaaattgaagagataccaaaaatgaaaagacatttcatgttcatggattggaagaattaatattattaaaatatccatactactcaaagcagtctacagagtcaatgcaatctccatcaaaataccaatgacattcttcacagaaataggaaaaaccatcataaaatttatatggaatcacaaaagaccataacagcaaaagataccttgagcaaaaagaacaaaactagtggaatcacattacttgacttaaaattatgctatagagctataaagagtaaaacagcatggtactgacataaaaacagacacatagaccaaaggaccagaatagagaacccagatacaaattcacacacctgcagtaaattaatttttgacaaacatgccaagaaaattaactggggaaaagacagtcacttcaataagtggtacttggaaaactggctatgcaaaaaattgaaactagacccctatgtctcaccacatacaaaaataaaatctaaatggattaaaaacatagaaatctaagacctcagactataaaaatactacaaaaaattgaggacactcttaggactttggtctgggcaaaaaattattgagtaataccccacaagcacaggcaaccagagcaaaaaggaacaaatgggatcatatcaagttaaaaagcttttttagagcaaattaaataattaagaaagtgaagagacaacccacagaatgggagaaatatttgcagactacccatatgataaggaattaataaccagaatatataggggcctcaataactctataggaaaaaaaaataataattcaattaaaaatgggcaaaagagttaaatagaaatttttcaaaaaaagacatacaaatggcaaacaggcatgtaaaaaagtgctcaatttctttttagagaaaagtgctcacttctcatcagagaaatgtaaatcaaaactacaatgagacatcttactcggctaaaatagcttttattcaaaatttaggcaataacaaatgctggtgagaatgtggagagaagagaaccctcatatactgttggtggcaatgtaaattattacaaccattatggaaaacagtttggaggtccctcaaaaaactaaaactagaaataacatataatccagcaatcccactgctgggtatataccaaaaagaaagcaaatcagtatatcaaagagatatttgtattcccatgtttgttacagcactgctcacagtagccaagacttggaaccaaccttattgtccatcaagagatgaatggaaaaggaacacgtggtacatacacccaatggagtcctattcagccataaaaatgaatgatattctgttatttgcaacaacatggatggaactggaggtcattatgttatgtaaaacaagtcaggcatggaaagacaaacatcgtatattctcacatatttgtgggttctaaaaactaaaacaattgaacccatgaagatagagggtacaaagatggttacagctgcttggaagggtagtggggtggaaggactgtaggggttggggttggttagtggataaaaaaagatggttagaaagaatgaataagaactagtatgtgacagcacaaccgggagactatagtcaataataatttaattgtacattttaaaataactaagagtataattggattgtttgtaacacaaaggataaatgcttgatgagatggatacttaattttccatgatgtggttattctgcattgcatgcctttaccaaaacacctcatgtaccctgtaaatatgtatacctactgagtacccacaaaaattaaaagtaaaaaaatttaaaaataataatatatattacaatataaatcttgtaactaaaaaggaatatagtttatattttccaaagtccagcaaatacctaatatgatttaaaaaataaaaagaactacctctgacttattcttgtgaagtttcagaaaataaagataaaaagatagtcctaaatctttcaaaaagccatccaataaagagatcaaaatcagttggaatcagaactttacccataatgctgaatgctggaagccaagcaacaatttttaaattctaacggaaaacagtttcaagccaaaacctcaataccaatcaaattattcaataaacatatgtatatttttatgcaactcagaaaactacttctccacaccattttttgaagtagttactttggatgcgcttaaataaagtgggtgggttaactaagaaacgacacatgtattccaggacactaattgagatccaactctgaagaacaatgacatgaagcccccagacaatttcatcgaagcaggattagaaagcatttttacttactggcacaggtagatggaggggtccagatgttatccacatataaaggtgcattgcacaattggagtactgtgctagactggataaatctaaggatatgacaaagcaaagaaggaaaggaaaaataaagacaattaaacaatccacgacaaataaaaataaaaataaataagttacataagagaagaaaacaataacaccctaagtagacaagtgaaaaatatttacatagtttaaataaagtgaaggttgtttttaaaaaaatatctaacatgttgaatcaacctactgacaaactgtggaaagatacattgtcaatcttaaaacttaaaaatagtaaaggtcctgataatagatgttgaaggtggaaggcaaacagaagtgagcaggtagacaggatgataatgtctttataaggatagagctaagattgactacatgtggttggtggagtaaataacagaggaactaaaagtaggaatataactagactgggtggttagcatggggaagggaagaaaggggatggtgactgtttggtttgtgaatgagctaaaacattttcttgtgtagtaagaattccatatgcaattcctaatgttcatagataagtattggtttaaggatattatttagagactcaaggacacctgaagaactacaaaaagaaacagtttgaatttgctgcctttagaggaacagaggtggatgggtagaagtagggtagaaattatttaacattttaattttgtgcatgtattgatttgataggcacaaaaaggtaaagtggaaacaactgaaaagagtcattcaggaatgattttattaagatttttgcttaagcttgttgagtgtgtgtacattcaaatgatctgtgagagtatttatatactgtatgtgaaaaaatacttttgtgaattccatctcatacagagatgctggtcttaagatttttttcccccagtttggtaacttcaggcaagtcaatgagtatttcaaaatctctgtctactcagcagtaaattgggggtatcagatcagagatggttctgtaagttttgtgtgtgtttgaaatagtgatatggtttggctctgtgtccccacccaaatctcatcttgtagctcaatgattcccacgtgttgtgggagggacccagtgggagatgattgaataatgggggtgggtctttcctttgctgttctcatgatagtgaatgggtctcacaagatctgatggtttttaaaaacgggagtttctctgcactagctctctttttgcctgctgtcttccgtgtaagacgtgacttgctcctctttgtcttctgccatgattgtgagacctccctagccatgtggaactgtaagtccaataaacgtctttcttttgtaaatttcctggtctcgagtttgtctttatcagcaacgtgaaaatggaccaatacaaatagtaaatctttattgcagttttaaaggtgtgctttatttcttaattagaatccctgtggtgtcttaatttctaccttgtttctattttcttattcctatccttaagtcagttgtagaaactttttaatacaaaatgtgtagagatattcatttaatactcaaaaaggtataagataaattcttgaatttttttgagacagtcaaaaaagatgtctaacctacattttaaatgtgtcattataacataattgaaaatatgacaatactagaaaaaagaaaggtaagtgttgaagccagtagctgcattttcagtatgacaatctatttccatttacaacatttttttttttttttgctgatgtctgtacttgtgagtgtataagaaagtttctcatccatggtaaagagcattaatgaaattactgtgtgacactccttgaaaaatgagagaaatatatatttagtttccataatgaaatccatatttgcttggtcatggcccaaattggttttgaaaagtatatatttcactgaggcagatgaagtgtccaaaattaataaggataaaaaataagaaaaatttaaggagaaaattttcaattaaagatgagtaactgttgattactcaggtccaagaatcaatactgattaatgttatgtaatgtagcagatcttgccaggatgaagatatttgagtgtaagctcagaatcataagaaacagcttctttgtaacttgcattttatagctgcccacatcatcctattctatatccataggctagaacttcagtcaaactgagtttgccattcttgggagatctcaggagattattccttacaacatcttggttatcattttgtcaatcatccagggaacgcccaacacttccttttgtcatttcaggattcctacttatgtcctttaacctgaatactttccagatctgctgttcccagtaagttactacagtccactgctgactgaatgttagtaagttttgattggattttaattgtacaaggtgactgagcaaatttgttagctacatcaacatcatgaggcaggacttaagagggtagtgagcaaggtcaattcaattatctgtataaaaatatgtcagtgaaagcctgcttttattctgcttaatttagaatttattctttcacttatttttgaggaagttttaaagcaattaatgataactataaaagtgctgtttaacaaaaaatcactggtgagtacagtgtatataatgcatagctctaaagaaatacctattgctctttataattgtctaaccctttaattgatttcataaatcaaagtttttaggcaagtatggcctatattaaaaatgaacacttgagcctaatgaatattttgttgatagaaataatttctgaatttctctgctgagtagcaagatagcactctttagtacaggaagggaaactttagaaaaatgggatgctataaaacttaaagtaagaattggaactgaaagtaacacattaatttccttggcataaatttctgctttatcatcctgaagctttattttggcacaaaggtagcaataacactaatctctcttctggaatccaaaccaaagatagattattttgtctctaaaaatttcattatgaatgactaagtagagaatagatgaaaaagtattttaatttaatgttaagaatatgcattttagagcagggaacctaaagttgagataccatttcatttgtttgtagcctcttctcttataaaatagaaataataagatttaattcaatggatggttgtaagaatgaaagaaatgagaaaatgtgaaatctttttaaactatgtttttctacaaaaatgagatgttaagataataaagaaactgaccctttgtcatttaaaaaatagttttaaatataaacatcctagtctctcagtagaggtactaagaaataaggagaagattataggccttgatattaaaacaatcagagtttgactcctgatttgaacacacattacctaaaggagccaatcaatgtatttcacatatttttgattatatactgccaaataaagaattgccctaaaactcagtgtcttaaaacaaccatgatttcgttacatttcatgattttttgggtcaggaattcaaatggcatagctggtgtttcctcagctgtatgtggcattgcctgtctctcagtgtattcaggcgatggatgggctgctatgggctggctaggatgacttctctcatgtgtctggagccatggtggagatggctggaaggctgggctcagctagagctgtggaatgacatgccaattcctgacatctccagcatgactatctcctcttccatagaagctggcttttttcagagtgaacatcccactggacccaggcaggagtagcaatgctttgtgtgacttagccttagaagttccaaacatcctttctgtcacattctttttatcaagagagatatacagtctaaccactattccagaggaaggggattagacctcacctcttaatctatcacaatacctctgagcttcagttttgcccttttataaaacctactccagtacagttgttgtgaagacacaatgagacaatgtctgttaggttcctcacatagagcctcgcacaaaatatttctctcctcttttatttttcatgtataaggaaatcatatttcccaatgtcactaagacactggacaggtgggaaacactgaagtaagcacaacttctcagtctctgagcattcaaaatagcagtgaagtgggtttatgcatggtatggttaggctttgtgtccctacccaaatctcatcttgaattgtaatcaccatacacgtgtcaaggtaattgaatcatgggggcagtttcccccatgttgctctcatgatagtgagttctcatgaaaatctgatggttttataaggggcccttcccccttcgcttggcatttctccttcctgctgtcttgtgaggaagatgccttgcttccccttcgccttccgccatgattctgagtttcctgaggcctccccagccatgctgaagtgtgagtcaattaaacctcactttcctttataaatttcccagtctcaggcacttctttacagtagtatgaaaacaaactaataaaatataccatagtcatagaaaatacccaaggctcaaaccatatgggatcttcaacttactgtaggccaatataggactggactactaaaaagtgacatacttgaagaacctagacacaagatgctagtactctaccactctgagcttttaaatgtgataataggagtgtatcagcatctcagcaactattgttttacagcctatttaccaattgctcttcctaatgattccagcaacacatgtttaaattctgttttgtgtgtcctttaagtatagaggatgtaaaatctattttaaaagatttctaaccataatggttaccattaagtgtggtctcatgtgaagtagtaagtttcaagattttctccttccctaatggtgctaattgatgtgttctctagaatgctatgacatgatttggaaaatatgtcattgtttggctgcccagcagctgacctcttgttttatgtttgtggaattatttatcttgaatcctggtaagactaagggaatatctttcaataggaagctggaaagggtagatattttttctcctttttggcaactagagtacacccatgagataggcttaaatagtcatggctatttcatatgaggaatcatgaagtagtgatataaagaatcagagccttgaaaaatacagtctggagacgggaggtcacagctgcatgccagtgtgcaagagtagggggtgaggcagagactgggacagcagtagtctgtagcattcaggaccagctgtagcagagcaagctgtggtattcatactagacttgctttgttgcaggattttatcccaattgtggctgacacctgacttatgtgccttttcaaagccaggtccttcagtcttccctgcaactctgtgactcatttcatttcatatctttgtctgcttaagtcagtcaaagttggattttgttgcttgaaattaaggatcctgatcattatggagcttactatcaagagtgcttataggccatggacccacagggaagtggtagcagtggttctcaattttggctgcacattcgagtaccctagaaggtttgaaaactgccaatgcctcaagccaacccatatcaatcacattgaatggccatagctaggaaaccaggtacagatacctaaaaagttatttaggtgattctaatgtgagaattaatacagagaaagaaatacaatgctttctgaagatggggatgttgacgtggattaataatatgtaacctgctcacccattcccaagttatgttccctgagagggtccagaatgtacttttttcaccaaggtttgggtgattccaataatcctggaaaatcacttctgtgtctgttctctttaagccagagacagtgaaacattgcccttaaaactggcttctcagatgccaatggagacaacaggatctcaggtagcagtggccaaccagccacacctaaattctaggagcaaaggagggcacacttattgcaatagtgttcagggcttacctgataatcatgatgattggtccagttggggtctttggcattctgcaattaacaatgggttggtaggactaaaatggatgagaaacccacaaagttcttccttgatttgtttaactggaacatttccaagtctggcaaatggaagtctgacttggtttaactttggagagtcataaatccatataaaattttcagacctaagtcatttccaacaccccagagcccttgaataaaaaacagacagtacccttgaggatggaacctgtgaaaacctaaaatgtactgaccgaggctgtgagtcctacccttccttgaaggcccttggtcggtcaccaaatagctcagtggtccttccttcactggcacagcataaagagcaatatacatacttttgaaatattttttgttactagatctttcttttttcttttttctttttctttttcttttttttttttgagatggagtcttgctctgtcgcccaggctggagtgcagtggcttgatcttggctcactgcaagctccgcctcctgggttcccaccattctcctgcctcagcctccaaatagctgggactacagttgcccaccaccacacctggccaattttttctatttttatgtagagacgcggtttcaccatgttagccaggatggtctcaatctcctgaccttgtgatccacctgccttggcctcccaaagtgctgggattacaggcgtgagccaccacacccagcctagatctttcttaattctaattcctgggaactcagaacaccactaggagttagaacaccaaaggagtcttggtttatctgccatataccaggccttatgggaccctgacaccaccctgtggttgttgtccctgcacccaagtgtacagaaggaaagagtatgcttgaaaactgacagaatctgtccttttatttcctgccctagagagccataactattatgataagaaggactaagtggagacctctggagaaccctctccctaataaatagtccatctaagggaagtacgaatagcaatgccattttcagacttgaaagaaataggggtaatgagttctttatatttccttttaatctgccagtttgcctattgtttacagggatcagatatgaagtttgagaatgataatgaattgctggaagcttaatcagatggttgctcttatagcagctgtagtttccagatgtggtctcttcatgggagcaaataaacagagcacctagttcctggtacacagatagcagtctggctgaactttttgtctctactcaaacagcagagaacatcagaagcattctgcttttcccttggaaagacaaatgcacagcaggggggaaaggcaaatctcacaaaaatacaggggcctatcaactcagtggcaactataccaggccatagcaggccttgaaagcactagttgtgcaagaacttagtcgcatctgtccattttgctatagtgtcgtcctacctatgacttacatctttagccttgtgaagagtttcctggaagaaatgggcctagtatgatcaggaacataactgctgcagcataataactagcatcagggtttgctgtgtgggaaatgaagtttcctcccactgggtagaaccttgagcatgataccctattgtctataagacctggacagagaaatggcctgagctcagtagctacattgcttcctgagcatgtaataatgtggtggtgaagttaaagaaattaaaggaagaatttttttaaaaagtgagaagtacaatgactatgtgtgtggatgtaagactgtttgattcccacatgacatctcatcagaaggttcctagtggagaaaactttcaataagcatgtggaaaagatgacctttgcatagaaagataattacaggttatgttcgtaccatctacagtgtagaatagttaattattccaggctgggatttgcttgccctgtctttcatgcatttggcaatctgtgaacttcctgatttccatttacaccattgtgggattgtacacaatcttgttcttgaccaagaaactcactttacaaggcagttgctcatcagattcacttttttttttttttatcatttactgtatgatctattagctcttggcctttgggaatactagttatgtctgctggaaggtcacggttgcatatttaggatatggtcctttaaatgcataatatgctctgaaccagcaaccaatttagggtattggatctcccatgaatagatggaattgggagtgacatgccctcaatgacgtcttactatatgctagaaatattttctttcttatccctaaaacactaggctctactagagagaaatgtttccatcagggaatacagcaagttctatgttgaattagaaggtaagatttattcttagccattttgggcttcacaaaccactgaatgatcagccccagatgagggttagtgttgactctaatgactgatctgacaatacaggtgcaacacattacaggatgggaagtatatgaagggaacacacctgataccttggctgccccccagtactgccttgtcaagtggtatacataaatcctatacagataggatcctttatgaattaaaatttggtcattccactggaaaaaccctagccagctagataatagaaaaagaattatgagaatggagtgagagtaagggagtcacacaaagacgcctttatgaatagctatggagacgattatagttttttctcagattctcttctttgcaatgttgtgtgtgtgtgtgtgtgtgtgtgtgtgtgtgtgtttcttctaactttttctttctcgcactattttgtatcatgtagtgtggtggtggttaaatttataatgtaattcacatatcacagaatattgaaataggattatgacagactgacagctataagagatccagaacttatagcagaatgttgactaaaatttgggtcacctttttgtaaggaaggataaacgtattttcagcatacagcttttgcattaattatgtagcagcagttttttaagccttaacaatttaaataaagttatatgtgaatcttgtgcagttgtagggatgacttatattatttatttttctttttcatgaaaatcatctcaatctccttaatatttgggaattgcccacctcaaaagttatggtagagggtagagcatcccttcatctcgccacagaatctgaaaatcagatgcttagtagcttagcttttctcccagtgagaatgagaatatatgatgtaggtttggactatgggatctaatcaccatggggctgcatgaataataaatgacttgaacaagcagagagaatggagactctattttgaaggtgatgagccatagaaacagtaggactaccaagtttccagagggcagctgtggcaatggctcaggagtggcctcaggtgtccaaggttggcattatgttttgggggtacttaattttggtcaagacttcagctgtagtcctgtctgctgttttacctctttcattcttgtcttttttacatgcttgttttttttcccctcatctttctggagattcagcaaatctttatatatgttcagggctgcattgtaagtgttaaataaataatttttttaagtcagcaagagattatttctcttgcatgcaacaaaaatggacagagaatggatgaaaagcagggaggaggaagataaaataagtattcttttcctaagtaacccaagacagagtacctggaaagagctcaaaatctaagcataaaaaggttagaggaatagaacacattcagtgtctcaaggtagtgttttctagcagtcaagaagacatgtgctctcttacaggtacaatataaaaggagaaaggaaaaaactatagttatacctacaaagccaacaaggggaaaaaataatgtgctttgctgacaagtcctgggctgggagtgttgtgctgaggatggggactgagatgggcaccggggatgctgtgcaactttatggcatgttggaaatagctttgctattatttgaattttcctagactttactagctacaaacatatttacaacaacaagagtattacagttccactaacttttgcttcctctttctaatgtatggcattggcctcatatcatgtgtttttatgaatttccaggagtctcttgggtttgttcacatcatggtgatgtaaagaggaatatgtgaattttttgccacacttttcattgagaggtgattcacttttccttctccttgattctgagttggccctgggacttattgtcaccaacagaatgcagcaaaagtggtgttgtctagcatatgaggctgggccttaagagactgcaatttctgcctttgcctcttggaatgctcctttttgggacccagtggctatgcttaaaggaagccatttggagagagaagaacccagccattccacccatacctgccaacacctacagctgatacctgccaacacctacagctgatgtctgccaggcaccatcacagaagactggggtcttcatgacaaaaaccacaaaataggttgttatttcataacatactttagaatgagagtgggaaaagcactgcatttgctcaaaagcatttggaaaaacttaaaatttcccactttgtaagtataaatcacaagtcacaatgcactggaacatgggacagttctaagtaacagacatgcagtgtgctcaagattctccctgtccaatccaccaaggattttcattttcatatttttctttattgtggtaagctcattgtgcttgactttttttttctttgttagggtttattcttccaaataagcctcctcagttactctgtaaatagggatctcttgtcttgccctatatgttctccagacatgtgaaagaaagtgctgtatcttatgtagattcaaactgggacagcttccacactaggggaatattagagtgtaatattctagaattagaatgacagacttctattgagttttcactcacactctccatgtatgagagagataccagaaagtgaatttctgcaacaggacatacatgagctcctggagattcttcagagtgactaataatatattcccgtttgtgtaaggagaccatcacaactcagacagatcttttcatgataaaatcaaaacacctgaagatggaggcaggcgaactgatacacattcaattcacatttcttttttaatttagtgacttcaactaacctcatatcatcatagagaagttacatatattattcaggggttaccatttgttacttacatgccaaatctcaatgatgagattgtcggctacgccagcatggggatgggactctactagtatttgatggtacagattttccttagcgaagagctaacttctcttattttatgtcacctggactcagtccaattattgcatcagttttcttaacctttacacaatgacaggttggctgtcatttccttaagccatatagtctggctcagacactttaatcacaaagtgggtatgccattttctcccacttttgcttttaggtagtatgttatagttcataatacactttctgtccactggcaaatgtttctttatcaattacttacttatactacaacttcagtcgatttcaaacaacttgatttatattcacaattataaagaaattttaccattgctaccaatatatcttagcttagcctattcagtatttttcagattctttggctgcaaccaagggatgtgatctgttcaacactgtaggggaactcaggtggaaattcatgtttactctaggagcaaaactcactcagcaaaggtctctcctatcagtgcttccgaaacctagaaaatgtgaaagccaactatataatcatatattcctttatgcaaaaacatttattgaacatcactatgatgcaagcaagtactgtaatagataaatgcaatgtgaaaaatatgtcagtgccctcaacagattggtgaggacatgtggactataatagtaatgataatacattgaaataattgctagtcgaggtatgtgtaatggattgtgaaagtgcagaggattggcatgaataacagttgtgaagagtcagttaaggctttataaaaaagtgatgtctaacactgatgaaggaaattgaaggggaaaccaaaaaattaaaaaatattccatgttcatgggttggaagaatcaatattgttaaaatatctatactactcaaagcaatatatattttttaatgcaatctctatcaaaataccaatgacattcttgacaaaaattgaaaaaaaaatccaaaaatttatatggaaccacaaaagacccagaatagccaaagctatcctgagcaagaagaacaaaattggaggaatcacattatctgacttcaaattatattacagagctatagtaaccaaaacagcatgctgctggcataaaaacagacacatagaccaatggaacagaatagagaactcagaaacaaattctcacatctacagtgaactcatttgcaacaaaaatgccaagaacatacattggggaaaaaacactgtctttgataaatggtgctgggaaaactggatatccataggcaaaagaattaaactagacccctatctctcaccatatacaaaaatcaaatctaaatgcaccaaagacttaagtctaagacctcaaagtatgaaactactacaagaaaacattggggaaactttctaggacattggtctgggcaaaggtttcttgaacaataccctaagagcacaggcaaccaaagcaaaaatggacaaatgagatcacatcaagtcaaaaagcctctatacagcaaaggaagcaatcaacaaagtgaagagacaacccacagaatgagagaaaatatttgcaaactatcccctctgacagggtataaataaccagagtatataaggagctcaaacaactctataggaaaaaaatctaataatctgatcaaccaatgggcaaaaaatttgaatggacatttctcaaaagaagacatacagatggcaaataggcatatgaaaagatgctcaataacattcaccatcagagaaatgcaaattaaaactacagtgagatatcatctcacctcagttataaaagacaggcaataacaaatgctggcgaggatgcggagaaaagtgaattcttgcacactgttggtgggaatgtaaattagtacaaccactatggaggacagtctgggggacctcaaaaaactaaaaattgagctactatatgtgtattagtttgttctcacattgctaaaaataactacctgagattgggtgattgataaaataagtttaattggctcacagttctgcaagctgtacaggaagcatggctggagaggcttcaagaaacttacaatcatggcaaaaggtgaaggggaagcaggcacatcccgcatggctggagcaggaggaagagagagagtggggaagtgctactgctatacacacttttaaacaacgagatcttgtgagaacttactatcaccagaatagcaaggggggaatccacccatgatccagtcacctctcaccaggtctctcctccaacattgggaattataattaaacacgagatttgggtggggacacaaatccaagctatatccacatgattcagcaattccactgcagagtatatactcataagaaaggaaagcagtatattgaagagatatctgtactcctgtgtttgttgcagcactgtttacaatagctaagacttggaagcaacctaagtgtccatcaacagatgactagataaacaaaatgtggtccatatacacaatagaatactgttcagccatgaaaagaatgagatccagttatttacaacaacgtggatggaactggagatcattatgttaagtgaaataagccaggcagagaaatacaaacatcacatgttctcatttatttgtgggatctaaaaatcaaaggaatttaatggacacagaaagtagaaggatggttaccagatgctgggaagaatagtggggagttggggaggaggtagggatggttaacagatacaaaaataaagaaagaatgaataagacctactatttgatagcacagtagggtgattatcatcaatgataacttacttgcatattttaaaataaagaatgtaattggattgtttgtaactcaaagaataaatgcttgaggggatggataccccattctccataatgtgctgatttcatattgcatatctgtatcaaaatatctcatgtaccccaaaaatatatatactatgtacccacaacagtttaaaaaataatttaaaaaacttatttattatttttttttgagatggaatttcgctcttgttgcccaggctggagtgcaatggtgcgatcttggctcactgcaacctctgtctcctcggtttaagcaattctcctgcctcagcctcccgagtagcttagctgcctggctaatttttttgtatttttactagagacacggtttcaccatgttggccaagctggtctcgacctcctgacctcaggtgatccacctgccttggcctcccagagtgctgggattacaggcatgggccaccacggccggcataaaaaactttttaaacaagtgatttcttaccttggtattgaaggtacggcaggatttcatgaattaaacctggaagaagaggaaccccagttgttccagtcatacaggcaaggccaacacaaagcagccagctgcaggcaatagccagacaattgcagatgtgtgagtgaggccaccagtgttcagcagacagcaaatatctgagtgagttcagctgacactagcagaagaattgccagacttaacccagcctaaactgcttcttatgtattcatgagctaaataaatgctgttgcttcaggcactaggtttcagggttgtatgttacatggcaacatattactgatgtaatcatatttactttttagaaagattaatagaaaagttgtagagaacagattacaggagatgagagtgactcagtgaatttaggaaacaattgcaagattgtgggaaacgccagttgctgtaaatcaggagcctatgtgccggaatcctggaactcagcttcttcctgaggacttgtgaaaataatcaggatcctgtctgactgattccaaagtacagcatctcctctgccatcaaaggctgcttatttttgcaatgttaagtgactgtgcaaaataatcctactgctagcttgcttaccaggacttgcatcctcttagaagaacttcccacaaagctatggcagacttattctgtaactccagggaatctctctgccctcccttcttttttccacacctccatccatttgaatttccctgtgaattactcctttggaaaacttgtagacagccaaacacacaaagtctttcttatatgtcattattttctattgctccaaattttaatccctgattcaccttctcccatagtgctgttcttctgccttcctctctaatgacttacctctgcccaaacgttttcactgtgcacttaattatcccgatccatggtaaaggtaagtcctctgtctctttattgagtgtttcttctgttgtcccaaacttaaagctgattttatcatgtggacactccttatcctgcggatttctcaaatgtatcctgcttcatcttctacacctgagaaatcctagaatttggagatgatccctgtgtcttttttcccactctgctacaactgctcttcaaaggatcaatgacttgctaaatgatcaaatccagtggacacgttcagtggcattggatttttttttttaattactgccttttttgttgttgttgaactgcttttttactttagatttcttaatacatttcctacttttctccttgagaatattttgttttttcatcttcttcaatttatttcttgaattttagtgttatttaggggtacatgcaaagtcctcttttctttttacataatatacaaaacttccttgaatgatctaatcttctcatggcttcagtgaccaactctatgtcaataccttaagttttaaagcaaagttttctcctgagatctgacccatatggccccttctgttggaaattccaaatttaagtcaagtcaatatgccctttaaacttatttctctctctctctctttctcttttctcttttatctcatttagaggttccaatacctaacagtaacctaaatgaagacttggctcccatacctctacctccaccagtcaccaggtcttactgtttctaaatgtctctgtgatctgttcacttatatttgtctgtttgcattgctattattctagttcaaatcaacgccatctcatttctatgttaattgaagattgggtcctttccttttattttcttttttgtttgagcttgaaaggtagagaaatgcagctgatagactaaaggatccctaaccaaggccagattttcagtaaagggaaatcgcagagaggagtctgagactgaagagcaggcctgaggccactagaggaagtgatgatcccagcaccatctaagtgccaccacgcagttgacatgggtgcttcttatagagaagggtgtgggtgaatcagaagacgtcacctgctagggagttgaagcctttggggctcagacagttttgctctgggacatctctgagtgagtcacattgagagaaagatcatccttctctgcatgttggaatcactgtggcccagatgaatgagcaaggatgctaacaagttggagcaccaagggaagccaggccaggttactccattgcgcccacatttttgtagatagccagagcttcagcaagtagtgacactgatagagctttccagaaggggtcagccagcaaggcattagctgccattgggaatggaaacctgatcaggttatagcggtgttccactatcaatagcaaagcaggatgttaaacggcagagtacagtagctgatgctatctgggttacctcatgagctgtcataatagtagaagctttaagtccaaacttcccaacctgtggcaagcatttattgatgggctattaatcccctcagcccttgggatggctgggcagaaacttggacagctggagcccccaggcctgttgtgttagatcatttatcctaacagggtaaacagtataattttccacagtggtatgacgagataaatattgggaagtactgtggtttaaggatctgctaaccatctgctagatgaagtgacagttctattccctctgtgttgcaaactgactgaaagttcacagttcagaggcttctcctgcctccttggtagttagcttaatgtgtacaatatacagctgtgtctgcttcaattctgtcctaagccagtattttactcattcataaaaaaattactcccttcacccctaggaaatagattaatgaacaagactgattaattttgtgccttcgtgtagcttatattttagtgggggagaaatacaataaaaaatgagttattgtcattgtgactttaattaaataagaataaataaataagataaaataaataaataaataagaagaaataaataaataaaacaatgaaatagacattttaaaagggaggtagttgttattttaaaattgaattgaatttggaaagcttgataaaggtgaattgtttaaacattgctattaaattagctttaagcaagcatccttaaaaagttaaagaaaaattctcattctatttccacatttggcttgctgtgcagggctctttaagttttcaggtaactctaaagaaacagaaacctgaaatcataaaccatttttgttatggtggtgtatacataaaagacaacagggaaaaatcctgagcagatctgtgatcaagtagacctcaagttgaattgggaaattaatgtacctttacatgttttcaattaaaacacaatgtttaaagtacattttaatatttttcagatttaactggttttttaaaattaacaaactgcataaattgctttgaataggagagcttctgtcttaattcgctcagtaaatgtttattgagcctcaatcatgccatcaaaactctgtttaggtactctgagagatgcaaaaatgagacaagaatctcattcttgacaggctagcagtttgaatgagatgaatgcaaaacactcaaagacagtaggtaatgagacagacaatgcattccaaccactagtctctcctcaaaaatactaattaacatcctcaaacacttctcaaaagtcttacttttaagaacctaaaaattatgaacctctgtatattgtctgaattagctttatccatcattatcatctaatcataaatcactcttccaataaaagtataaagcagtagccaatactgtaatgtttctaagatgttaacaaatgcatcttaaatgggtcctatatttcatgtaattatcttgacactatgtctgtatgggactgacaattctattctaaataattaactaaggaaggaatgggccagcttctaaggccactcaacatcaaaacaactcattttgaattcccctagcccttgtctctaatgacacttcactctccttaattatgtgcttcctttcatagctcttctgtcttgaaagggcagttaccatactttaaatacaaaaactcatgactactatagatttctttttttgtttgttttttacagttttcaaaatgctttcacatacatttttcacttcaaacttctgtcttccttccatctcctagttctccaagccagatggaagagtcagccggccttgctccactcccagcagtcagttttaactcataaatctctttcccctctttccttttatatgatatatccttttattttttaaaaaccacgactctttaaaaagaagctttagtgaggtgtaatttgcatatgataaactgagcatgtttaatgagtacaatttgataagcttcagctgaggtatatgctggtgacagcatcatcactctcaacataaggaacatacccatcattctcaaagtgtctttgtgccctttcaaccccttcctcacacttcacatccccagtcatccgctgatctagtatctgttccagatcccaaagtcaggctgagaggtagtagacaaagaactgtggaatgttccattaactccccgtttgcttaccctatgaggttatctaactagttgggggctaaatcagggatcagcttcctattttctgtgcaaacctcacaagctgcatgtactgtagtgttcacagtgctaaccgtgggagaaagaaactccaataaaggggttgcttatcaaatggtccaggaatgtgccacaaaggaagagggtacaattggcttaagatctacatgaagggacaatgaggagcatttctgaatgggtaggtcaagccagaggaacatatgtctaagctttgggacttgaaatagagttctttttcaattaagaagttgccctgtgaaagctgccaataactcagggtagggggtttatggagattatataatagcagtggaggaaagagaacataaagtagggatggaaataaatagaaatttattagcttgtaaaattatatatgagcattggaaggaacctcaagaatcatctagtcaatgctctgatttttgtgtcataaaaacaaagtatgcaggtcatccagttcacttgtggcagatctagagctaggatccaagcctccgattttgattttgtaggattatttttccttgcagaattaatattactatagataatgcctaagaatattaggctctgctaaaattagctgctctgtttggtggtgagatgcagaaatttgtatcttgggatggtggttgcaagtccttgtgactaggcgaaaaatattccccagtagctcttgattagtccccatatcactggagcaaggggctaaagatatatatttgtagatctttgagataagaattgtttcacattgtgctgatgatattattagaagtataaattattgagctatgtccaacataaagttattttctgacttgtgcagacacagagttaaatcataaaccatgtatgttataatggtgtatgcataaaagacaacagggaaaactgaacatacctgggaccaagcagacctcgagttgaactgggaaattaatgtgcataccctgtgtatggggtagaaaatggagaaataatattgtctaagtttatttgtttcctatggctgtttttctgtccacatccctgtcatttctaatctgacctcaggcctgtgagctgaaattcacagttttatcgtgttttacctttcccttttcagcttaatttgtctcctttcctgacaataggtcacactgattcacacaaaacatttattggaaaccaagaggaacctgtttattgtttatatctttttgttttaaaaatgtgtgtgtacatatatacaaaatatgtgtctctatgtctatctatacatatacacatatttaaatgttttcctatgctgtccatagctaattttgttgtttactttggtatgatacttatttgcaaaatacctctgtgaatatcctgataatggacttctcttgtaaccattcattttaatcctatcatatgtagaaaaccaaaaatcctgtgttcaaattgcctgtgcctttccatgtgtactcacatcccaatatagtcaccaccaagaataatgaaatacaaatcctacattttttcaagcttagggaagatggcatgacaaatagctacttttctttcagttacctctagttataaggctcggattgcatttgtaaagcattaaaacatttccaagttttccagatgctctcattttgtaccctggctgtctgttttctgtgttctctggtgatttttcatctcaaactcatacttttcaagttcctcagggcttctcttctttctacacattctcttgtgatttcatctatttctgtggttctaaataagatcttttagactcagcaggggtgtccaatcttttgacttccctgggccacagtggaagaagaactgtcttgggccatacataaaatacattaacactaatgatagctgatgagctaaaaagaaaatcacgaaacaacctcataatgtttcaagaaagtttacaaatttatgttgggctgcattcaaagtcattctgggccgcaggttggacaagcatgttttagaggataactccagtactgactatgcctacaattccagacttatagagccaactggtcacttgacatttctatttagatatcaaagaggcatctcaaacttaacatggcccaaacgcttactttcttgttcttcaaatctcctcactcatcttcatttcagtaaatactatagtgcattacttccccaaataacttaaactaaaaatcaagttattgtttgtgtctctacttttatcataatcacttatcaggtcctttggacacaacctcctgagtgaggggtgttcgttctttgatgcttaaagttgtacaatccttttttcttgtagagccagtatgatcatatcacacctgtttttaactctctaaccactgctaatcacaattagaataaaattcactccttgccctggtttatcaagcgcctttagatccaggctatctttacgtcatcaactaatctcatagtgctggtcactagttaatatttttcttatttattgtccccttttcccatttttcgaagtgtaaattccatgaatgcagatttttattatcagtgccaggcactttgtaaatgctctatttatctatctatccatattaaataaatgaatggtgtgttaagctaagtgaattatagcccctaaagagcaactatactcttaaattttctaaaaatgattaccttgctttaatctctattcatgaagaatttagttttatgatgataaaacaactatagggttctaaaggcctaagtgattccagttgaaatgattatgctttttcatttttttattgatttattaaacaactctgatcaaaataatatacgtcagatgggataaattcaaaactaccaatggatgacatacattctttttaaaaccttttaatatcttttaatattatatactttcttacggtcactggatgaggtccatagactgcattaaattcttataaaatatggcttttctactgaaggaggataattaatttgagcagtgtaaggggaaagttagcatattgttgcgccattttctggaagaaattatctgtgtgctcaaatggctgattaaaagctgtgacaatgtctggcacctaaaaaacaaggaaaaatccctaccaacatatttctgctcaatttttttttttactattttaatgggctcttccaatgccagagagccctaccacatcaatgtggatacagaagtaacatcaccaaagaatagaacacatttgaaaatagacttgcctaggaatgaaggtggtttagaaaaaaagataatacatgtagattacaaataaagcactactaaagctaatggctggatatttaaaaaatgcgttcatcaaataaatcctgtaatcttgaacagtgatgtttccattagacgcttatttatctacctagtttgtccgtcagtttaaagtgatttcattaatcattttatgtttatcgtttgatgtaaagcaacatattctctcccatcgttatatgttaatttaatcatcagtttatgtttgtgtacgtttacacaattctatttggatggttattttacttcctatttgagattattgagataaacaagcagctttcgatgctaaagatttagggcttaacatcaaaacgtctgactgagcaatacagtaagtagccgaaactctttcatgcacaagactgcttatgggagtatatcacaggcagcatggacttatgcaaaagagtgaatgagaggtctccccgaggagcttcttcagatgttcctatcctcaggcacataccctcactggatgctgtggtataagacctaaaagtaaagcccaatattatgtgctgctttgacgtttggtgaaatcaggaatgatcatttggcttaaccccaagttccacttcccactctgctcctgtagatacggttccccagacaaacaaaccttcttattaaggagactaggtgcaatttctgcttattcctaagtagtaggtttcaattctataccagttgtcttagtccatttgctgctataacagaatagtataaataggctaatttataaagaaaataaacatattcctcattgttttggaggctggaagtctaagagcatggccctagaatctagtgagggtcattctgtggcagaagggcaggcagcagaaatgagcatgcatggcagagagaggaaatgagggctgaatttcattattttatcaggaactcattcccacaataactaacctgctccgtaaataatggcattaatttatttataatggaggagccctatgacctaataacttcttaaggcctcacctcccaatactgttacataggcaattaaattttggcatgaaattttttttgtgcggggcgggtggcattcaaaccacagccccagcccatggaattattattcaagcaagccatttctgtcttcccagcaagaacgcagggtacctcacccttttgatactataaagcctgcaacccggcgcggtggctcacgcctgtaatcccagcattttgggaggccgaggcgggcggatcatctgaggtcaggagtttgagaccagcctggccaacgtggtgaaatcccgtctctactaaaaaatacaaaaattagctggacttggtggcaggcgccttaattccagctacttggaaggcagaaaaaaaaatactacaaagtctgctttccatagccctaggctgttcactctattcatgaatgaccttgcgtggcatgtgacgttctgttcctctggactgtaagtatttgtgactaataaatgattgtcaatatcgtaagtccagtttcagttattgtatgtctggtcatcccattaccctaaagtgggaatcgctccctcatcagtgggtgaataggaggtgattaaaacagaccctcccctgccactcccacccaccatgtgcttggccctacaccagtatattgctactcaatgtcttcggacattctgatatgtcactgctgaccttgtgcttagaaatatgtcttcttgtatctgtgctctgagggtaagacatggcattcagaaaatagcataaatcatctggttccatatgctcaaatatattttaactgtgacaatctatttgactatctatagaaaagataactaccttagttctaagacaatagtaggttaaaattttaagatttaaaaaattttcgtggtgagaatgttatactatcaaacaagtcattgacagaagtctggatcatgtgaaacacataaatggcctgctttgcacataaataaacctctgaagaagtttaggacgtttgaactggtagaagaaaggtagaaaaaagaaagtgaatagtgttctgaataaataacaatagctggtatttactaagcacttactatatccggtgatttccatgcattttctcacttagttctcacaataaacttatgaaactattatcatagattacaaacaaagcgaaaataaaactccaagatgtagcaagttaaataagttagccagggctagaaagtggggaatataaggtaggagtctaccaatctgtctaaatccaggtctaggatctcaaaaaaacttcctacctttcagtaaatatacatgcatcagtagtgagtcacataaatcaagaatggtacactaatttgcagctccaacactcgctagctgtttagtcttaagccaggtgtgtctgatctccttaaaattgttttctcttttatgataaacaaaaagctagcaaacaaaaagtactttagagcactgctataaggatttactgaaataatgtaacttaaaacacatggaatgtttgttgtgcttatttctaatcactgttttattcagtcacccattcagtaaatattttctgatctgctaacatgtgctagctactgttatggatacttggattatgtcaacaaaaaaagcaaatagtcctaccttcattcacatcttactccattcatcagataaattccaaatgaatcagagtcaaatatagaatataaaatcatacaacaactagaagaaaatataagtaagtagctctaaaacctaaaagtgaggaaaacgtttctcactgtgacttaatattcacaagcaatatagaaaattgattacattatttttaaatttaattaattgtattaattacatttaattaattaattaattaatttttgagatggagtctccctctgtcacccaggctggagtgcagtggtacgatctcagctcactgcaacctccgcctcacgggttcatgcgattcttctgcctcagcctcccaagtagctgggattacagtcatgtgctaatttaaagattaaaaaaacctgaaaacttttgtatggaaaaaggcaccaaaaacagcataaaaagaaaaacagctcacaaaaatattggtgaggagaatattatgtattaaaattgataaagcagcagcaggtttagagaggattcactccaattttgaaagaatttccaatacaggtaaaatgctatcaaacagtatcacatgctacagggaaatctttcatgaaatgaagagtaaattgatgcaacaaacttcattgttgtcttatttttaaaaaaatgcaacagtctatagtcccagctatgcaggaggctaaggcagaaagatcccttgagcccaaaagcttgaagctgcagtgagctataattatgccactgcacaagacatagcaggattctatctcttaaaaaaattgccacagctattccaaccttcagcaaccaccactctgattagtcactagccatctacatcgaggaaagatgcttcaccagcaaaaggattatgactctatgaaggcttagatgattattaatgggttttagcaataaagtattttaaattatggcatgtacattttttaagaaacaatgctgttgcatacttaatagactatagtgtactgtaaatataacttttatatacactgggaaaacaaaaaaattgtgcaacttgctttattgctatattcactttattacggttgtctacaaccaaacccacaatatttttgagatgtgctttcattctgatagggattgcattgactctatagattgctttgaatagtaatggtcatcttgacaatatttattcttctaatccatgaacacgggatatcttttcatttttttttttttgcatcttcttcaggggcacttcattttatcacacacaatgatatattactagggcttaatatcctcgtatgacagcagaaaactccaattagttatctcttaaagagttgaaaatggcatttaaaaaatctttcataaattaagaggattattaaatttacagatattaatgcaaatcattcttcaactcaatgctagtaaaaaatccatgatgctccggtgggaaaatatcaggtaagaaagaagactgactcctaacagaaatgacaatagattaaggaactctcaccagactctacagaaatcctggaatactcagctcttacacaacaatgccctgtgcagataaattgatggccaaatgaactctcacaatgccacttctactccaatagacttctataccataaacatgttatccttcgcgtcagtcatcaagtgactgagtcacatttgccaggatttaaatcaaagatatgtacaggatattgaagagataccaagggaacagttaatttaaacacaagttaactggggaaagagagaatgaggaataatgatgatggatatatgtttttttttaaggaataatgaaaatgttctaaaaatacagtgtaatgatgattgaacaactctggatatactaaacgccactgaattgtgtggcttttaatcactttaaaaggatgattcatatggtatttgtggtgtctatatacatatgaataaatctgttatcaaaaaagtaaagcagagatctataggaaaatggttgattttctgtctggggcagaaaatgtgtgagatgagcctggatccattggtcatgtcagaaagtgagaaatctattaaaaatctgtatgttgtaccatcaatatttagaaaccagcttgaatatgctcacagtgatcaaagatggggcaacttacacatcaataagaaagtaattgacataaagtaaaacacataaaacatgtccaagaattggcaaggcaactaaaaaaattcctcatcaatcatcgaataaatcttttgtggttacataaccagttgcgttgccattgtttttttttttttttttttttttttttttagcttaaaacagcagtatttactactgcacagtctccatgagtcagaagtttgggcacagcttatctttatcttctgctcagagtctcacaaaactgcagttgaggtgccagtcaggcctggctctcatctatcttggtcagtgctactgtcatttgagacctgtgggacaccgtcaaacagaccaacataaacctgatgggagttcctgaaggagaggagacagagaaagtggtggaaagggtaactgaagaaataatggctgaaaactttccaaattttgtgagagataaatctacacattcaagaatctaaacaggcagggcgtattggctcatgcttgtaatcccagcattttgggaggcggaggtgggcggatcacgaggtcaggatatcgagaccatcctggctaacacggtgaaaccccgtctctactaaaaatacaaaaaaattagctgggcgtggtggcgggcgcctgtagtcccggctactagggaggccgaggcaggagaatggtgtgaacctgggaggtggagcttgcagtgagcccagatcgcgccactgcactccagcctgggtgacagagcaagagtctcaaaaaaaaaaaaaaaaaaaaaaaaaaaaaaaaaaaaaaaaaaaaagaagaagaagaagaagaacctaaacaaactacaaatagaataaacttaaagatttccacagctcaacactatatgatcaaattgttggaagtcaaagcaaaggtaacctcaaaagcacaagacaaaaatgactcattccattaaggaaacttcaataaaattaacagtctatggtatatttgttatgaaaatccaaagaaagtacaattgtatacttacaattttagaaaggattaaatgttattggaaagtggatggtgtatggtgaggatgtgcagtattcagtaaaatgatcaataaaatgtgtaatttacatatcagaatacattctggagcaaggagcaaggagaaggaatagagagtaagttgatatctatgtcttaatctgttttttttctccgttttggtttctgttcatgatggtatatcataatctcttatacgtgtgtctacttacatgcatatattacatattcataaaacatttatttgtaaaattaatagtttcatgtttagtaatggcaatgctatagaatttattgtagacgtatgaaactgtatatagttcttttatctctctaaaatcaaagtgaaaccttttctttatctaaataattataccccactttgtagttttatgccgtttactttttctatgtggagccaaatatagccatataagatgtatgtactaagatttttgaaatatatttaattttttaaaaacctattttatattttattggatttttttgtcacttgctgtatattctgtagcaataatttctattaaaaagagtttaatgataaaaatgatgatgggttattttaatgaagttctaccatataaaacatactcagaataatttttattttaataagactagatatcttattgaaattcaccacaaacttgacaaagaagagattttttttttttaaccatttaccattactttgtgggattgcttttggtttattgtcctgttattctaatactgaattgatattttgcatgacaagccttattaatttgccagaattattcctcctggcaacatctattcagaatgcattgtagaagcaggtagagggttagtggggaaggatggaagtaaataatttaatgtattagagaggaaaatgtgatgcaagagccgcagaggaaattctatcaatttgaataatagacagtgagagttcttgagttcttcaaaacattagtatctttgtagtagggctttgagaattagggttgagtgatcctaacatcatctggcattggtttaccttcaacagatcctcaactaaagcagtttagacagaagtagaaatccattaaaaattatttgcaggaggatatttatcaaattctccctgtggaccacttatccgggggaaatcatatttggacaagttctgataatacaaaaatggtgtgatgttcctggaatgaggctgataaattgcttggcagttgcagtgcaaaaaatatatgcatggtgttgggtaataaatacatctttagtattctctctctctgtctttctctgtgtgtgtgtgtgtgtgtgtgtgtgtgtgtgtgtgtctgtgtgtgtgtatgagcaattctaaaagaaactatatctgtatgacagataattttttaagccaaacatattttggaaggccaagaagcttgtttctttccagattttcaccggagcaaggagaaggaatagggggcaagttgatatctatgtcttaatctgtttttttccccccagttttggtttctggttcatgtggtcatggctatgatgattagtcaataatgcagatatttacttaatctctgtatattacagtttccttacttgtaaagtggtaataatcgtatctttgttatggggttattttgaagacaaaattagataattattacaaaatgcttaacgccagcctggcaaataagaagtgctcaatgaatgttaggtattattattattcctagtgctcattgtcatccacataggtggctggtagaactgactctatcttctctcagcctttgtgcatagttaaaacaattcttggccagtgaaatggatattaaaatagcttgaggtgttttaatactttaaatagagtatagagtgggtctgtgtcaatacaaatagttttagaaagtcagagggataacagggctgattcctgggaatgaacagtgcacccttaaatgacaacaaagtcaaacattcagcactcagtggaaatagcatgagtagtcataataaattggccatagtaacaggcattaaccaatctgcttgaaaaaaatctgttctttaaatcagctgatggaagtgcaaagtcaataggtaaaaagatgtaggatattacccccaaattttagtttggcaaatgcttttttccattattcgaaatcgatagatatgtcatggtttccactaaagaatgttatttattcaattacttacattcatattgaatcctttcaaatactgaaacatgttgaagtggtctttttgatatgctacatctgtacccttatttattttgttaaagaatctgagtcagcttgggcaaccataaatatactatagactgggtggcttaaacaacagaaatttatttattgtcttacaattctggaggctggaagtctgagatcaaggtgccagaatggtcagtttctggtgaggtcccttttcttggcttgcaaatggccgcctggcttgcaaatggcaggggaaaagagaggaagacagagagagaaagagagagcagagagagagagacagagagagcagagagagagagagagattgaaaacaatctctctggtgtctcatcttataagtgcctttataagggaatagtaaagggccctgccttcatgacctaattcctctcaatggccccagcttcctacatactgggggttagggtctcaacatataaatctgggggggacacaaatattcagtccattcaatatcttaatgaggtagaaaacgtttcataaataagcaatatcacaaattatttgaaacatttcaatgtaaatctattctcatcactttggtatacatttcaatttacgaacattttgtttaatgtaacaataaattagaatgttgaaagttgactttgggtaaatatttaatttttctcacaaggaaaatttactcctggccccattttccccagttattttcatcctgtaatttaagtatgcaatatttgatcttcccattatctttgctttaaaacttattttggacactggttttttaataatgatgaaagtcatagcaccacagtccctatatcattcctgggtatgcctccttgcagtcactcattgcttgttgtatagatgacagaaagagccttgtagctggtctttctgttttcagtctgatccatgttaaaattattaccaacacaacagttaaattctccttccctttttcctgctcttctttttttaaaccttttttctgcccttatttcattcttccattattttttaaaagaattatcttttttaaaaagttacatggggtacaacttatttttcctaattctttaccttcctattctgaaaataagttatgtaactgattttacttgtgatcataagacttgctttacatcaatacagaaagagcatttttcatttaaaaggttgattaaaaatatagccattgtttaatatttctctttgtcaaagttctttttttattattatactttaagttttagggtatatgtgcacaatatgcaggtttgttacatatatatacatgtgccgtgtggggttttgaccattaattttaaatttatgagttcattttattatctctttagttaacaagaaaatagaaaaaaaatggcatggggaaaattgtgaggaaaatgtttctaaaaagctattgtcaaagttctccttactagaaaaaaggattgtgaattcttcccacttctcacttatcatctgattaagcattttgcagatatgacatctagatatgggaaaacataagaaaaatattccaattacttaggtgtcctccaatccttggaaggcactcagcctgataaaagtgagttctttgacataatattttgcataactaaagttcaaactttattgttttaacatctatacatctatatgtaagcaataccgtatgccaggaacaagtttctattatagatctgaatttgtcctcccttagctagaaagatcattttatctaggccagaagagaattgctgttacattctcagcataggagcaccttacctgattcatgaattataagttgaattccatatccaactgtatttgcgttcttatctattcagatctttgttgtttttgtatattaacatgttttctctcactgtactagaaatctttttgttcccttttttattaaaggcatttgttgcactctccttggctggccctcctcccacctccatcccgtccaattatgtttgtaacttcctgacatataaatgttgatagtagtatgaaaagagattatctagtataatacactgtcaaatatgagtttttttgctactgctttcttacaacctatgactctcgagtctttgaaagcctaatgaaactattggcaattctgtaattcattactttgtactctacagtgcttgtttaactcttatggggtttgttctattaaattacactccataataataaaaaaaaagacttgctttggctattgaaatgttagaaaaagcggtgtatgtctatgcagaaactttaagggctttctggcagttttctgattgtcaaaacaaaatataaaagccctttgtgtgcaatcccttctggattcctctgtattggtaaccactgccaattgttcgatgttcattatttcttgtctcttttctatgcctgcatgtacacctagatatataattatgtaacttaagtggtccaattctctgtttcatttaggatgcttttgctatacctaatagaaaatttcttctgagaccttacatataaataaagtccttatggattaaagaactaacatgaaaaattgtgaaataattagaagaaaattcacatacccatgcacacacacatactatttgcatgggtttcatgcatttctgcatatcttgtatccacttttattctggacaatctttacaggaagtttgtacagcaaacagagttcccttgtggcagaaagcaagtaaatttactgtccaggataataaagataatatctgcttacaggagaaaggttaggcagatttgcgtatagccccctttagaaggttgccatttcttaagctcagggctcatcaactcaaacataagccaactatatgtataacatatatgtgtaagcatcactctgtagggcacgggggtgataggaatctttatgaacatgaagctcacactcatactgcctattgtgtggctaataaattcttttgtcactgaactgggagtcccatctcttctgccagcatctataaaactgtgtcagaataacttagtttgcaagtagttcaaaatctcagatatttcttagttcctgaatatatctgtgtctactattatatcatctgtatcaattacctatctatctctctatcatctatctatctagagatatatctgagcaatttgctttggcaatagtaataatttttctaagcacgatatacacatttacacaatgatgaacaaaagtctaggcagggaggcgggtataactctctcatgcccctttttatatattcacatctatgttctacttaaatctttcagtgattcttcagcaccttcatgatgaggttaccactcttttgttatctaggtgtgcatatgcctctgcctgatcttgccatttttatacttggatgatctcttttgccactgttaacttgtggatctctctgatgctattgataaacagtggtgacttcactttttagtccactgagtgaaaggtggaggtgttttaagtcaagctggcatctcactcttgtaggtggatctctaagtttgctatcatttctgtggctcatctttctttgctcctttccttcagactgaatacattgaactgtatacaatataggtaatatagacctgcaaccgaagggccacaagctctcagaatgttagtacgtgggctgaggaacaatgaaagatggtatgggcttaacgtattatgcaaatgaaagtcttttcaaactgagtttaataaatactccttctaccatttcttcccttttcagctatccatttaaatccatcatgctgaggcacttcctcccttcctgaaggtactttcacctctctcacaagaggaggagattgcaacttaagttttgcacatttgggtgacactttaagattcagccaaatactaatagatctttcctttgatcaagccataaaggatttagaatgagaagtggcattaattccaatctatctgttactagagagagctatgttagtctttattggcttacctatgatgtaaataaaccacaccaaggtgaaagttcatataaaaaattaagttaacaaagatgtgctttttcttattagcctgactttgatcttgctcattgggaatagtaaattttaccactgatatgactatgaaaagttttgctttttcttgactcacttgagccatgtttgcattataagaaaaactacacttaccgtaagtaaatggcactctctatctctctttctcctattgaagtgtaatggtgccaatcctgattacagtcttttattattatatacgaggaaaattctatttcatcctgttacacttgagttttcatttaatcagtttacaggttgccctttgccaattctgttaatttaatttcctaacattttcatttatgcgctctcagttccaactgtttcaaactcttcaggttccctactatgagttattgattttttttttcattttcatgaagcttcattcaagcaaaatcttacatgaaactcaaaaatacagaatacataagaacacagttgcttcgatggaagcaattgagtagcctcagcgttccatccaattatctttttccagctccaatccacagactgccatatttctcacaacttctgtccactgtctcccactccttcatctggtcaatcccttctcctatatcaatttttaattcttggaagtcttttctaccctgccattatctctgagatgtcacagcagtcaaatctacctctatcatagtacatcacatctatctgttagagtggggtatctctcactgacaaagggtcagatactgtttgaaaccaaatatgactcttgcattttgtgttcctaatgccaataatagtacccaagccatggtagttgttcaatataagtgttttctgagtgaatgtatggataaataagaatttctggccaggcgcagtggctcatgcctgtaatttcagcactttgggaggccaaggcggatggatcatgaggtcaggagatcaagacaatcccggccgacatggtgaaaccccgtctctactaaaaacacaaaaattacctgggcatggtggcacgtgcctgtagtcccagctgcttgggaggctgagacagaagaatcacttgaacctgggagacggaggttgcagcgagctgagcttgcgccactgaactccagcctagcgacagagcaagattatgtctcaaaaaaaaaaaaagaaaaagaaaaaaaagaaaaaatgaatttctacagtgacatctctgccttaaagcatttgttttttgtatgttcattttactcaacaaatataaccaactgttagttctccatcatcaaggaaaaagaggaatgaaatgcacaatattaaaatacttcagtttgggattaggattacttctatttttaatggatactatttcctttgattttctgggcagtctcatgtttttctcaaaatcattgagcaccacgataaagttgacttagacagaaattgaacagtgcctaagtttgactgtttctattcccttttaaaatgcttcccatgtaccacacagcccaggaatggggatcatcatctctcaggtgaatgcaaattgacatcctaaaatgaggcaccactgagtgttttatataccttgccacttccctaggagaagtaattatttggtacaaattacatttttacttagtagcttatcctgtgggagtgtgtgtgtgcgtgcgcacacacatatacacgttggggccaaaagaatcttaagtgtagactatttacagagtagcagatactctcaatgaagaaggtaaatcaaagcatatatatatatatatatatatatatatatatatgtatacacatacatacacacacatatgctcacatatatgatatacatcatatatccatatatatataaatatataaatagtttttgttaggagccatattatataatctgctttggtgtgataatcccataagatgtgcttaatttaaagtccaatgccctataccatgacatacagaaaaaagattactttctgctcatctcatttcacatttgcaacacactaaattatcagtttttacaatgcagcagtggtttgggcttgccatccctaactattactaaaggtgaatgacaacagatattttgggcatcctgagtagcctgaagtcttcctcttctatccacttaaaatgacttaaatccttggcctgtgtgcaatgtaaaaccaacaccctcttccttatttctgagggttttaaaggaattgatgttgtccagatacctcccattctgcattccttctcctcctgatttctgatttactcaccttcctatcattgctcctgggattgtttgccctcctccaatttctttaagtgttaacaacttttttttatgatccttcttcaaagaaatcaactaaacataactatcataattagcatttttaatggaaagattcaggataatggacaagaattacaacacagtcaacaacttcaacttgaatatgttaaatatcaggtatttcctcatttacctacttagagcgtttttcaacaggtgcctttctcccagttgccaagatcttcctaacttctcttaagttacatcttccaaaccccagattctttagtctgcagagcaatatcactctcaacctttatgctataccaggccatggaactaactttgagaagctaaaatattcattaacaactttcttaaacaaaattgtcatttacctctgaagcagatgctgcctttgcctggaaagtgaaaacacattttattttttaaaaataacaacgatggtatatagatgcatgcgtatgtgtatatatgctttcttttatacctagaggtgctgcccttactgtgagaaattgttcattcaggtagctgtgtctttaccattatgatagcttatatggatgtacatctaactgtattatatacacatgtataacacatgtatatacagtgtatgttttgatgtttacccacaataagaacactttcttgctgaatacaattttaaaaactcaatttgtctctggaaatttagggaccaaaaaaaacctccaaaaatcagtacttttgtctgaaaattacccaggaattaaaatatgtattgtcaggttcattttgcccttcctatgaaacagcattttgttacacaacttcattattaaaacattattttttatgtgtccaacaacttatatcctgacttatcttttttttttttatgtatagtaggtccagagccccttactctattttccactgtaaaatctttgttgattccatttatttcatatcattatatattttggaatttgatcatatttaagccaaaattggggaaaatttcaatgcatctttaacttaaaaatatggaatcttaaaaatatttaaatgaactttaatgtaacactccagtttattattttcatagtgtttacaacattttcctaaagtaaaagtggatgaccatgatagaattcctactcacctcctgttttctggtttaaataactatcaattaaaatgtgacagctttttctgttatcatatttatagtcatattgatggagattccttttatttacagaattttattgattttgcaagttcctaaaaggtacttggaaggaacagtaatggaatggatggatgcattgccttgtagatcaatcaaagagaatttcacggattgtaaagtgagaacacatttactgaggtcagcatttttgttcctgctgctctttctggaactgcagccagcgacttattagtactggttgcatactttctggaatagcaagcgaataagagcacaatacagcagagtttcttggcagggagttgcattttcttaactgctttaattctcatgattgcattaggtgcagttcatctctgatgaaatgctctcagccaagacttaggaatatatcaaataggagctgatgtttcatttcttggagcagggcactcagttgtagatacaggcatggatgaactcaagtgcagttgcagtagaaatgaaaaagctaacaaatagtttgggtaatattatattttattttcttctatgtcatttcataaaagataatgctgcaatcaggttggtgtgtgaatgtgcgcatgagtatgtgtaaaagcctatgagtatgtttgtgaatttgtgtatatatgtatgtttatactccaataaaaaccgtgtctatttgagtcatgaatagactttacataagcacagttgaatctcacgttcagcagtgtaggtagaaatttttacattgtctggaaattgcaagcggaagactgtgatttagggatgggatataaagaggttcagcaatgaaggactacgtagagagaagggccactggagaacccattggaggtaaaattgacctcatgttttgaaaaagtgataaaaataagtgaacaaatggcaaccatcaacaaaaatgacacaattccttcctttggagtgtcattagggagttatgtgttataaaattcattattgaaattcgaggcatgaaagctcatggcccaagtaaagtgggggcagagactgagttaatggaagggctatgtaaccattaatggctcatcccaagcatagctgaccatgacctcctagctgaccacgacctccactgtgtgcagtggaatcctgggaaatttaagagctactctctgatatgctgagactttgcaggcccattcagagagctaaataaaacaacatggttgcaggtaatggcaacaagctaaatagctaaaatcacccacgacatttagatgtgtattccaggctgttagtttaatgtttgctgtatgtactatgtagtcttttctgttaattatatttcttaactaatttttagaaagagtactctacttgaagttcataactgatagggagaaaggtgggaatgggaatgggaaactgtacaaatatttaatgactctaaatatttgagagaactgaggaaatatcacatggattatggtgctaaaaaggactgttatctaactgagtttttgtcctgatccacttcctgttccttatcttattgtactattccatcttctgccacttaaattcacagaaacaaaatgcaagtaaatgcatctctttttcttgccttcccagactgatttaataaaaatggctagatttctaggaagagaacatctttttggagtccactccctgagctgcgaataaatggaaagcttacacaggaattgaagaatttgaaaacgtggataatttgctccttgacctttggacaatttacttaacctctttaaatgtcaacagctttcttacaaaatgggaggcaaacttgataatccctaaaatttaaaaatgtataacattatacagagaggacagtggtaaacttaggactgctgccctttctatatgatgtaattttatataagacaaacctataacaggtctaatggaccactgtttacagtttgagtcaccagtgccttacccatatttccttttaactatatctcataaattcatatgaaaaacccttatagacctattccacataaggggaaggaaaactaggaagcatgaaaaatgaatattaatttaattaaacttttctataatggctcactgtctgttccagaatctgaaaagtcccaggtaccagaaagctggaaaaaaatagagccagaaaatgggactaagaaggactctgctttcatagtaaaatactcaacatccttgctgtttttaataatgtggaaagttgataatggtggtggtatggctggtgggtttgtgtgtacgtgcatgtggtgtatataattatatacatataattacttttagagctcttgcatcttgaaaaacacccatctgtttggtaacattttatgttgtggcactttcctcacatttgaaaatgcgaattttgatacaaagacgtgtattgtttttttttccacactaagattcagaatgttctggcacagatatttctcattcatgttagatatctacattcagtataacattagctatttagatatcaataagtagaattctttttatatgggagttactgggtgagtccaacttgaagttgaggatattttagacaaagacaaaagcataatgtagataaatgcatcaagcataaaaaggaaaagatcaaagtgaagaaaagaaaagtaatggagataaacccagaaaggtggacttggagtaatcatggggacccttgagctttatttggcaagtaaaggctaaacttactgaaggtttatatgcaggaagtttgcatgatcattgctgagctttataaataatttagtagaagtatataaaattaaataaaatatataaatactaacaatggggagtaaaattaggaagaccattttcataaccttctcaaacatgtgaaaaaagaaaaaatgtgccactccacacactggagtgaaatgaatggaatgaacagcagtagagaaaagacattctgagtgtccaaatcttagtgtctgagacatagtattatcattagaaatgggcaacacagaagatgattggatttgcttaggtttttaaaggaggatgatgaaattttgctggaaactgagaattggagttgacagcatgctatacacatgacacttccctagcggcatttggaaatgcctagagaagttaaagcttgaaatagagatttgtgtggtggcttcgcaggtgtggtggctgtaaccctggaggagatccccttgagaaagaacaggaaaaaaaaaaaaaaaagaaaatgataatgtgttgttgggagaaactcctacatttgtagatcagcaggagaaataagccagagaagcaaacaagctgaaggtaagaatcaggaagcgtgtcaagaaactacattgactctgactaggcaatgtgaaagttttgatggtagtcgcccaggtattattgattactgtgaactgaccggtgcttcacttaaaacttgaattcctgtccaaatttaaatgttgaacagatcatacaatggagactgtttaatgagtgttataaggaggtgcccccaaagaattcggaaattacagaaatatgtttgctttttgtcaataaaacaaaacaaaaatcaaacctattgaaaatcgagatcatattctttgacctagctagaaaattgtaattaaaggggaaatggattggtttgtacagaaaaggtccttttagagaagcaagctttggaattttagttccagcattgtcccgggagagagatgcaacacttgagggactcagctcattcatgagaaaaatgttctcttctgtgggcggaaatacttctttaggcttcatcagaacaaaataacccccatttaaatccttgagctttgctttaattctgtgccatcgatcaacctacttatccaattattggctatgaatattaaagaaagcatgggaattagaagtggtattttctacagtgttagttttctacaatgttggtattcttaattatacaactattttatgagaattagttagagtcattttatcacctatttctgggtgcagtgttaagtcccagtttctggtttcaagttgaagagaagactgcagattacggtagaccagcttgggtcacgttaccctgagagaccacttcagatccatttccactggacttacctttcttctcaactttttaccattcattttctattccaagaattttcaaatctgcagttccctggtgatcaaatggtcttttcttacaaaacttgtattcagatctgccaggagaaccatcaggtgttatactgttttctgacaaatatatgcagacaatagctggctgcatgcctagattagtgtgtggtaaacacagttgactgattgactgggatctactttgcatttgatggttgcagagtacttaagtgctttgtgtatttctatctttgggttgcttagagatagaaagccctaaggttttagaatcccaggataattatatttcagaatgagaagacataatgagctatagtttagattccactaaaaccagagtattcagtaatttttatagaccagttaatttactcatcttccttactatatttgttttctctttcagtgactggaactattgttttccagtaaatcctagagggaaacactctgtaaatgaattgatagttacataaatataatatttgtcaaggcacgaagtgctaggagcatattttccaggttaagcaccataaattaatccatacatactgagaaattaagaagtaggaacactataaccatgtatatacacatattctgcttaaacatttgtgtcgattgatttgacttttctttaaatccaatatttctccaatatctatttttctaacatctttaacaccataaataataaaatgtttcatgattttaattattatgacaagtatgctttttatacagagagattaatttccttgtctatttctgtcaatgggtaccgttgaaaataaattgtgtttaaaaagtttttgtatgattataggcatgaattctgtggcaagatggtctgaatttgaaccctagcttcctcaaatattaactgtgttactttcggcaatttacttaaactctatgagtctcacttttctcatctataagacgggagagtaatagctcctagtccctagtgttgttttgtgaatgatttaaaatatataaatcacttagcatagtgtccagaacatattaatgctaggtgatagttggccattattataactcaatgtgcatttatttaggtattcagatatcttacagagatttttcagaataataacatcctaatttatgaaaaattacttcctgctactgaaaattaattaggctatccttttataaaattatatattcgacatttattcaatataattgaatatttctttccccaaccttctacattggggtactataatttcattaacttttctaacaaaaccaagtgattatattgagacagtaacataaccaacattttcagaacttgcaacattggtctagtaatttacagctacccagattaatttgaaagctatttacatgtaattagtaggatttcttgtattcggtcaataatattatctttgattggataatagtaaccaaggcttgatatacatgtttatacataaagcttattttactttaaatttctggggtcatttattgtaaagggaatcatatcagttatttgatacctgagaggataattctttatatttgaaaattattatattttattgtggcacttatagaacattttttctgttagcctcttagcctaaagcactgaaatattatgtagaatattgtgttagggtacaacaataagggaatttgattttacaattaggagaatttgtacagcttgttccaattatcactcttcattttatatatacaactaaccttaaggcctcatttacatgaaagttggttcactttcaaccggtgtgcatgtcacttgtgatgatttctagtctacttcatgcaaagcaatttcagtaagtgcttaccttgaagtgatttatgttcacacaaagaccacggggatcccacttactgattccatcatacgacaagctctcataactctctatttctctagaaataatattttatataattgcatcaggttatattgtttaaaatgttgaatctgtttcttacctcttccctggaggttataaaaaaaatcactttttttcctccattgtaagaagattttaaaatttttctttctatggtatcattgaattcaggagggcggggcaagtgagtttaggaagaagtaaatactgataaattctataaggtaaacatgaaaagccttaaagaaagcaggttatattcagaatcacattaacaaagtaaaggttcaaaacagtattatttttatataagaattacaactttgatgctttgaaaataaattatttgtatgtcaattatacatgactaatttcaattttaagttgttattctttgtagtaacaaatctagaatattaatctttaccttgttaaaagcctgcttttatttactacaaatacattgtgtagtaaacaagatgttcaagtcagtaaagcagaacacttcaacatctctgctcattagaaagtggcatttgggccgggcgcggtggctcaggcctgtaatcccagcactttgggaggccgagactggcggatcatgaggtcaggagatcgagaccatcctggctaacaaggtgaaacccccgtctctactaaaaatacaaaaaattagccgggcgcggtggcgggcgcctgtagtcccagctactcgggaggctgaggcaggagaatggcgtgaacccgggaggcggagctggcagtgagccaagatcgcgccactgcactccagcctaggggacgagtgagactacctttcaaaaaaaaaaaaaaaaaaaaaagcggcattcaatatgatattgaattcatctttaacctatatgtgaaaagatgacctgataggcattaaaaagttgttttttctgaatgcttgcttatatagcatagaatggagggtgggctgttaaaatgaggcaataacctgtttcattcggggtcaatgtgttcaagaaagaaagcttgatatcctgtcaagtgtttatgaaatatattactgtgtttctaagacttcataaagaatctcagaagcttccagtttgaagcctgagaatatggcttgagtttgtttaagggacaaagaaaccagattatggttatttttcctttcactttgtgatgatttcactgatgactgggaaagattcagatcttttacatagatgcatgtatatactcacacatgtggaacaactttctcatgcctgtagctcaatacggagttaaattgtgcacatcaagaaagaatcctctgcacatcaggaaaagtttattttttggttttgttttttgttgttgttgttgttgttttttgagacggagtctcactctgtcacccaggctggagtgcagtggagcaatctcggatcattgcaacctctgcctcccaggttcaagcaattctcctgccccagcctcccgagtagctgagactacattgcccgccaccacgcccggttaattttttttttttttttgtatttttagtagagacgggctttcaccgtgttagccaggatggtctcaatctcctgacatcgttatccgcccacctcggcctcccaaagtgctgggattacaggcgtgagccacaccttggcctggaaaagttttaaaaatgagtctgaaatttcattactgcaccgtacctgatatggtttagcttgtgtttccacccaaatctcatcttgaattgtaatctgaattgtaatacccacatagtgggggcgggacattttgggaggtgattgggtcatggaggtggttcccccatgctgttctcatgagaatgagtgagttctcatgagacctgatggcttcataatggcctctgacccctttgctcagcacttctctctcctgctgccttgtgaagagggacgttgtttgcttccccttccatcataattgtaagtttcctgaggcctccccagccatgtggaactgtgggtcaattaaacttcttccctttataaattacccagtctcagctatttctttatagcagtgtgaaaacaaactaatacagtacttacacattttttaccgatatctctcatctcttttatttcaagagaagtggctaatctgagctcttagtatccccttgtaaccagtattgtaaagaagaatattttggcatccactcttttttatttagccccataaaaactatttccagcttattggcttttctagtgtttctgactaatgttattttgatcaaacctgaaatgtctaccttcttctctcattgctactgtgttgagatcttggaagagggtgaaaagtgactcattactttttccaattctcttttaatccttttagctttaccttcttggccttatgtactctgcttggcaaagagaaaggagcttcatgttctgaccattggaaaagagtcttaatattttttaaatgtgctactattctctagggctattttgctagaaaggttttgacagttgtttgagttgctcctcttcctcctgtgtttgggcttaaaaatcacatggaagagtacacttggttagtaatgttctggtttggttatgtgtgtacagagaagaggaatggcctgctccgcagactcagcaaactattctctggaagattcctggtcattgtggaagtagctagaatctaccacattcgaagtagcacccttcccctctccaagcgctggtggtccccctgctgcttcctgttctttggttcttccctattctagttgtgttcccaagccttgtctctgtcaaacagctgcctaaaatgtggctaaatctgctaaataaaaagacaagatcttagagaaagcaattcttttcatgtgtggcttatagacataatttctattattttcttataatcacagggagttctcaactttgtcatataaattgtggaagataatgttgattgttttatttcagggattggcagtctttttctgcaaagggccaggtagcaaatattttaggctttgtaggcatctggtctctgtcacttctactcaactctgctgttacagtgtggaaggagccatagacagtatgtaaacaaattaacaagtgtggctggagtgtgtgctaacacagaacttatctaatagtttctcccttcattgttttgaaatccagttttgctcagctagtaagttgatgaacacatcgtcagggaagtaggttcctccctaagctcaaggtgatgaatcatgactgatttaaaccagtcacgccaagggtcaccagttgccagtgattggtttaggggtaattgtacatcttatttcaggctgttaaaacataaaaggaaatccgatgggtccttctggtttatgttatgtgggagaagtccacataaggaaagcaggtctttaggcagctacatcaagaggatgtgactatatcacatctattatcacaggatgataatagcaatgatttgtgtgaacttcaagtaactcgtcatgacatctcccaaactgcagcacacattagtaccacctttatttttggtagagatttttatattgaagaatgaatattttttattttttaagcaatcacaactcacagcaaagataaaccttatgtctttggaaacttaattaaaaatgccataaaaccataaatattttaaaatgctatcttttgaaaagatatcattgcaaaataactaaacacttctttcaaaatctcttgggagtacagcacttccatttaatgtagtttatatgtatgatttttttaagattgaagagaaatgatagaatacaatttaattaaaaagttggggacttgggggagaatttgtaggttttatagaagtttaatgtacttatgcacacacacacaatattctttttttagaaatggatacagtacaacccatattgagtcatttatgaggtgtgaggtcacataagccagccttcaaatattcatatttatgaaaattatttccttctccatgattccttccttatatgaaaagtgttactatacattttacactgtatacatttacactgtacacatttcattgtgtcttgaaactccatacaagtaggcagtttagttgctgatataagaaatctttctattaacccagaagtatatttgtctttccacttattatcaacattcaaatggaaatttatttcaaatataccccacatttgaatcttaattcaaaatattggctgtcaaaaaaaaaaaaaaaggtctgatggagccctttttttaaacttgtttgctaaccatgggataaagataccagtttggctgttttgcctggagtagctttgcccttaagaactggccttcctgctttctaattagagaacttattttttcccttgctgaacattctgtttgaatttgttttcctgtcctgtttaaattctttctgatttgtaaaagtaaaacataaccatcagaggtaggttttggattaggctttaatgacatttgaagggaaaaacaaaaggaaaactgtgcttttcagatgaatcactctcttgccttcttttaatactattccatctgacaataattggcaggcgtgagcagtctcaggaaaagggggctcacactgaatggaccatcctcacacacacactcctgatgcctaatcgctgtttctccatgagatgaaagcgactgactgtccttgagaaatacacacaattgctcttgtagcactggtagtcagggcaatggatgtcatagagtcctcataaccgtatctatcaaatatttacaagaaatttgggggggttcttttttaaaggaaggaacctcatgggtctgtctatgtgaacatccttcttttgcatgtagagaacacccaaggcatagtctttcaactttccagagctgttttaactctctgcagtctaaataggcaagaggagtctcaaacttctatatgtcaagctacatctcaatgataatatcaaattaatttcacatatcaaaacatttaaagttccttgaggagaattgcacctgtcttgtaaaagttaatttgactaagtggcctatgtggctgtccaataagttaagttgtcctttgataggacactggctaactgggatgagtcaatgccttagtcagttcaggctactatagcaaactaccgtagactggacggcgcataaacaatagaaaggtattttgtactgtcaacaaaaagagtcaaactctgtaaaatatttgaagagatttattctgagccaaatatgagtgaccatggcccatgacacaaccctcaggaggtcgtgagaacatgtgcccaaggtggttgagatgcagcttgattttatacattttagggagatatgagatttcaatcaaatacattaaagaaatatattggtttggtccagaaaggtgggacaacttgaagcaggggcttccaggttataggtagatttaaaaattttctggctgacaattggttgagtttatctaatgacctgggatcaatagaaaggaaacgtctgggttaagataaaagattgtggagaccaaagttcttattgtacataggaagccttcaggtagcaggcctcagagaggatggattgtaaatgcttcttaacaggctaaggtctgtgttgctgttaatgctggagaggtatagtgaggcatgtctgaccccactccccactatggcctgaaccagtctctcaggttaaattgtaagagtgccctggccaaggagaaagtccattcagatagttgggaagccttagaatttcatttttggtttgcagtacagttccggaggccggtatcccaagatcacaatgccatcacgattgggttctgctgatgggccttttccgggttgcagattgatgacaactcattgcactttcatgcgggaaaaagggggccagggagctctctgatgtcccttgtataagggcactgctcccattcaggggaactccacctgcgtgacctaattacctcctatgatacgcatacactgttcctggctcataactgccacacccttattatttctccccaagacaggccatagaaactaaaaatgtattctaatcattttcacctttctgtcttgggactggccataaagaaattctctgacctggccggcatggtggctcacttctgtaatcccagcactttgggaggccgaggcgggtggatcatgaggtcaggagttcaagaccagcctggccaagatggtgaaaccccgtctctaccaaaaattcaaaaattagctgggcatgatggcaggcacctgtaatcctagctactcaggaggctgaggcagcaaattgcttgaacctgggagatggagcttgcagtgagccgagatcgcaccactgcactccagactgggcgacagagcgagactctgtgtcaaaaaaaaaaaaaaaaaaaaaaagaaagaaattctctgacctaccttgtcttatggtaggtcataagattccccatttcagaaattcttcctcatatccaggaggaagacatgctgcacagagaggccaagaagaatctgaacagacaggccttgccgggtttcccgcttagcctagtattagatcatactctttttatccagtcacgtttgtacacagttgtccatgctgcagtcatgcctatccagcaaagtttccctaaaaggcccaaaagatagtgttcagagggcttctatatagctggacacacagaggttcctagagcatgtcatgcccagggaaggcatgaaagctctccaccccttcctccataactcacccttacatctcctcatctgtatcctttgtaatattctttacagtaaactggtaaatgtgtttccctgagttatgtgagacactttagcaatttaatcaaatccaaaaaacgggtcatgagaactccagttttaaaatggtcgatcagaagttctggaggtcccgaattacaactgatatcggcagacggggaatagtcatgtgggactgagccctcagtctgtgggatttgatgctatttctaggtagatagtatcaaaactgaattggaggacacccagctggggtccactacagaagtgattgcttgcttggtatgtggagaaaatgctccatacatttggtcactgaagtcttctgtgttgactgttgtggttgagagcagaggaaaaacagtttgaggttttttcttcagctcacacctccaaatgccttaccttctaataccatcacattgagggttaggattttaacatgtggttttgaggggatacattcagtccatgttaggcaatatgtatataactctgtgtgtgtgtgtgtgtgtgtgtgtgtgtgtgtgtgtttgtgtgtgtgtgaatttgtgtataacctatcagtattagagtataggaattatttcagtcgagtttagtaaaagaggttgtggaatagtttgggaaatgttaacaattcattgaacagagaaatgttatataatatgcagaagcacaaagccaaaccagggttttagtctgaacaccacaattcactggtggttatgcatctgaagggtgactactttctatagtgtcatctacaaaataatagacttggaagaattgaataaatcgatatttgttttatattgttgcatatcaaattaactatcacaaacttcatggtttaaaacacatctattcatttccacatggttctgaggtaagaaatctgagtactgcttagctgggtcctcaggacctcacgaggctcaactcaaggagttagccagggctgggttctcatctgaagctcagggtcctctttcaagctcattgaagttgttggaataattttttctttgcatttgtaaaacagaagtctttagtcttcctggctacaggccaggagttgttctcagctcttagaggcctttttcagatcctggccacatggctctctcaaaacatggcagttacttcttcaaagccaacaggaaaatccaactccagtttgctaagatgaatcttacatgatataacataaccaagagagcagctatcccaccatgttcagatccctcaagaagaaggatcgttcatggtatatgcaccagggagtggggatcttctggaccatcttagaattctgcccactatatgaacatagctagatttgtgttgccagcctgtaactattagactccaaataaatcttctgacagaagttaagagaaggaatagccaccatcatcagcaaagatgtaaagccttgatttgggactatctcatggtcttgacatgtcttagagatttctattatttgtcttgttaagtgtcctcttgaatgcagcagcctagacataactggttaattatcattatgatcaatacactctatattagtttctatcgctgccataataaattataacaaactccaacagcttgaaaaaccccacctgtttattgtctaagagtttagtaggccagaaatccaggcacagcttagctcagctgattttctgctctgagtttcatgcagccaaaatcaaggtgtcagcagagctgatttcctgtctggaggctctggggataagtccacctcagagctcattcagaatgttggcaggattccgttccatgtgactgtaggactgagggccccttctccttgttggctataggctgagggtttatttttagatcccagaagctgtcaaatttcctggctcatggtcacttttctccatcttcaaaacctgaaatgacaggatgagtcattcttatgcttcaaatatctttgacctccctttttgcctcgtaacttctctgtctccctctcctgctgtatctcttttaatggctcttctgcctttttccctgcttttaaggacttacatgattatatcgagttcatctgggtaaatctataataatttctctattttaagggcatcaaactaagccacccccaaaatatgccactttggcataaggattattttgagctgaaagcagttgaaaatcaactgatagagaaagagttctttctcaccctcttatctgcctaaaagcaggactatgttttatatatatatacatatatatttacccttttctatgaataatattaagataccataactactaaaacagatttcctctaaaatatcagtggcttaacatgatagaatcttatttctctctcaggaggggattgccagtggtgggatggggttcaggtggggcagtgcagtgacattctgcttcacgtagtcattcagtgcagtgccactaacacctcttactggagtttcttggccatcgacctccagccagaaggaagagagagagggatggcaagtgagatgtttatgtgtctcagaccacaagatagtgaatataatttccctttatactagaaaatgtaatttagctatgtgcccagcctggagaggaaacaggtttaattgcacataattttattcggtataggaaatatgtatgtaaaaaggcttatgtattatacatattttgtaatattgtttatttactcagcaatatatctcaaagttttacttcttatttatatcgttgttatttgactacatcttttttttaggaagatgtccccactcctcacacctgtaacagggacacaagaactcttatcatcaaagatgggagctgacaccaggattagtttgcatgaacagatcttatcttcctctagttcaaatttagtccttagctttcattagtttccccgtatgtttcctagttgcttctccgcaatttatcattcatgtaaatattaataaaatggtgtgccttttcttctgttaatccatctaattttagtttaattcaaaagcccccagatacagaattcagaggatagaggaaaaatttttctgtctcaaaaaaaggttacctgtttaattatcataattccatctgccgtcctaaattctagaacttcccttcatagaaatactcagattaacatttgattgaataactaaaggaaggaaatcttggggaagcagcatctttagaattcttcctaccacagcttcctaaaattaatgaacaaatgtttatggtgtgttctgtaagtgtatttaatgttatgcattaaatatgggtgacaacaaaatgagaatgatgggttcactgctctctaacagcttaaagttggtaggagaaaatttcaagtctgtataagatgatggagatatgtagagatcgtatctgggaaggctgagagaagcagatggaataataatagtggacaggcacaaggtcatcaccatgtagggcatagcttggttgtgacctgaaagacaaacttgaattaatgccacagggaattagggaattgagcggggcttctagcaaatctgtactgtaaattagcttataatatagggttagacagacatatttattcatcctgttagtactagaggtgactattttttcatatctttgtttcccatcataattgggaaacaaatgagagatgtgtaaaagtcaggttgaagaaagcaaagtgtcactgatattcctgataaatctgatataagaaaacaggctaacaggtcagccttacccaatcccagtccccaacgttgccaagccctcagttctcccttgaaagaacctgtccttgcaaactcaatggcatggaggaacccagaattcatgtgccttgtggattcattgtttccctccaaagtttcttacaaattaccctctggagagaaggaaatgaatagatggtgcaacaggcctacagtgaaatatgagctaggaaagaagaggttcttccctctaattctgcaaacttgtggcttcaagtagagagaacagtattcactctcaacacatcttccaagaagaatgtgaattcaaatatgacaaaacagagggcagaatttcgaggttgttagagaaaccttgtggtagaaatacaaggccattgagtttagctaaatcatgttatttatataacactttagtcaggaagtggtttctctcactgaggttatcagcattagaaaggcagtcacggaaacaataaccctgaatggaatgttgttttgaaagggaggctttagacagcaggtccttcagtctagtgaggaggctactgatttaattctagtcttttgcagtctagcataaattgctaagcaatgctagataaaggccacttacagtaaatagctttaaagtctcagggtcatcattttgctaaaaggaaatcctggaaccaagcaatttaaaggccctgtggacatggaatacttatactcaagtcagaagccaagtgctactgctgtttaactgtctgtagtgtgagatactcaacagcaatgggaaattctctgctgaagtatgacctgacgtatttcttttgaccttggacgtgggtagaaaggaaaatcaaagtgacttgccctacctgggataattttttgatgaaaatttttctgaagaaattttgcacgggtaaaaagatactcttaaaggcaacttacgttcaatcaattgatcttggaaagaagaaaagtagctacagttgaaaattagcattggcctacagattcaggatttaaaagttttattttattttttcagtgtgattcaatctcacttgttcattttcgtttttgttggctgttgacttttggagtcacattcaaggaatctttgcccagcccaatgtcgtgaagtatacatgaatacaaacatatatacacacatatatagttatcatttgtcaattaaaaataaaatttaaaaattaacgttttaaaaaataattttaaaaaataaaaatgatcgttcatataactgtcaatgcaaaatttggaggaacctgattttaaagtctactttctgggtcaatacggtatcaatgaagctcaatattgcttatgggtttgttgctgttattcctgttaaatttaatatgaacatcaaattaaaatatgtttgcttatggtgagcctgtttcttccacgacgattgccatgaaacaaaccaacccaaacttgggggcataaaaagagctttaattgtgctcattgcttctgtgggtcaggagtttctgaaacggacagtgggcatggctcttctctgctctacatgtctgggccttcagttagaagattcgatagctaggagggaagtctgggtcctagtgtcagctgatacttgttcactctcatgttgatccttggctggcaagacccagagtctaggagtgacagcaagtatgcctatccttgccctctctgagtggcttaagttcctcacaacatggcagcttacatgcaagttcaaagttccaagtttaagtgttgcggcgaagaaggcagaagttaccttagaagctatgtggtaccactcccttcattgtcaccccttctgttgattacaggcgagtcacacacctgcttacatgcacagggactgtgttcatatacacctctcagttggaggagtgccaagtttagcttgcagaagcaaggatctgtgagatggaagatacgttgtgggtatctctggaaacacaatctgtcatgatgtttatggtgtatttatttattatccaattgagagtatcttcctaactaccatcaatattgccattattaccgttatgcacttggtaactatacagaaaaacatttttatttgtggtcaaaaaagaaatgagattacatattctgataacagtgatgagaagaacaaatgttaaattgaaaagtgcaatgacactgttgttatttagttcactcgtaacattatagatatattccatttgtacatattctccatgaaggctttatttctcttcattaaggcaggttgtgtcagccaaacagcagatggcctaaccataatgcctttaggcagatgttctcatttgggtcataacatgtgagcaaaaaatgccatattccaaactgtctcatcatctctagtaattactggataacatccaatgtttacacaagtcttttatagctgtgtattatattggctagacctaagtactgaaggcttggtttatagtaacactattttgctaaattttgggatagattatacaactctattcaatttgacatataccaaatggtcataatctatataatataatctaggcataggattaatacaataattattaattctaactttctgggtttaccatttttaaagacgatattgccaaaatagataaaaaactgaaaataaatctattccagaaaagaagtaaaaaaaaaagagacagaaaaggaaaggcaataataaattgggcaataagaaacattaagatggttttatagcgtgctttgaggattcatttcaatcttgcaagattccaaaaggttttttttttttttttaattcaggtgcttgccattagtggaacttctaggacactagaagcaagctgttttgagtagttgtagtgaaaatggaagacaattactgcatttcatgaacaagaaaaatattcagagcctggtatacaataggttttgtgcagatcattttttctctttcaatcttgagtactattaaatcattcatcctttctttagtcaaacttcagttttatgaagatggccccttttagcatctgcctgaaactttaaaagtggtaacagaaggtgcttcacataaaaagtcattattgatgttgctttgcgaggtgtaacacagaagcatagattattcaaaagacttaattagaagacagaccttcatgttaattagcacctgcatcttccatttacattttctattcattttacctatattcttaagaaatattattgctgagaaaaatgacatttcaagaaaagcatgcggcctggcacggtggctcatgcctgtaatcccagcactttgggaggccgaggcgggtggatcacctgaggtcaggagttcaagaccagactggccaacatggcgagatcttgtctctactaaaaatacaaaaatcagctgggtgtggtggcaggtgcctgtaatcccagctactcgggaggctgaggcaggaaaatcgcttgaacccgggaggcggaagttgcggtgagccgaggtgctgccattgtactccagcctgggcaacgagagtgaaactccgtcttaaaaaaaaaaaaaaaaagaagaagaaaagaaaggcatgcatcagaatgtatatttactcttcaattttcttagtgtattgtgcatgtaggcaaataaaaatgtgccatatatcacaagtagattcggtttttaccaacatttgacagcactttctggtttttgttttcagtggaattccttaaatgtgactccattaaccagacagttaatacattttagtttggagcagtggttcttaaatgcagacactttttaccccggggatatttggcactatctggagacatttttgtcaccagcttgtgggtagaggccagggaggctgccacacaatgcaatgcacaggacaagaaaggcctcccgccaacaaagaattatccagcacaaaatgtcaatatcatcaaggttgacaaaccctggcataaggtaagaaaactttcaaagtatgtttaaacacaaacgtttggcagagatttaactggtatataaagttgcaaatagtgatgatttaatatgggaactattttgttcccctccaccactattaattgaaaagttttctgctgtttgagatttttttttctaaagatgcggtattaaatattgaaaccctcagttttataggagaacttgaaatattattggagtgaatttgttatacgaactcatgacttaattgtcaaaaaaggaaagaatttaaaaacaagctgatgattttcgagaactttctacatttgcggattgtgtttagtattttgggaagcagaatcattccccaaccttgcccatgccctaatcctcagaacctgtgaatactactttaaatggccaaaggggctttgcaggtgtgattggttttaaggactttgggatacaaatgatctataagtgggccaaatctaaccatgtgagtccttaaaaatggagcacttttcccagctgtggtcagagaatcagatagatggcagcatgagaaggattcgacctgctggtgctgttggctttgaagacagaggaagaggaccatgagccaaggactgtgggcagcctctagaacacagaaaaggcaaggaactggattctaagagtcttcggaaaggaacacatttttgctaacactttgcttttaacctgaaaagatcctcatcagaatgtagatctagatagctgtaagatataaaaatgtttgtgttcttttaaactattaaatttgtgataatctgttatagtagcaacagtaaactcatacaagtatttattgcatatctcatttaatcctttcaacaatcttagaagaaaggaactatcattttctttaaatcacagatgggaaattaatgtctggagagataaagtgatctacacagggttacataactggtaagttaagggacaaggtctcaaaggaagaagaatttaaaaaccagtgctcttagaactgatccctaaattattttgggggtaaaagagtattattccttttcttttttctcttcttttttttaacttttattttaagttcaggggtacaagtgcaggtttgttacataggtaaacttgtgtcatgggggtttgttgtacagattatttcatcacccaggtattaaacctagtacccattagttatttttccttctcctcctcctcctcccaccctcccccttccaaaaggccccagggtacaaccctctatgtgtccaagtgttctcaacatttagcgtccacgtataagtaagaacattcagtgtttggttttctgttcttgtgttagtttgctaaggataatggcttccagctccatccatgtccctgcaaggacataatcttctgtttttatggattcataatattccattgtgtatatatactacattttctttatccagtctatcattgatggacatttatgttgattccatgtctttcctattgtggatagtgctgtaatgaacatacacatgcatgtgtctttataacagatgatttatattcatatgggtagatactcagtaatgggattgctgggttggatggtatttctgtctttaggtctttgagaaatcgccaaactgtcttccacaatgactgaactaatttacattcccaccaactgtgtataagtgttcctttttctccacaaccttgccagtatctgctattttttgactttttaataatagccattctgattggtgtgagatggtatctcattgtggttttgatttacgtttcttaagtgatgttgagctttttttcatatgcttgttggctgcatgtatgttttcttttggaaagtgtctgttcatgtcctttgcccactttttaatggggtagtttgtgggatttttttggtaaatttgtttaagttccttatagatgtaaaggcataaaacacataccctgtctttggtactggttttttgtaaaacgtgaacactatgattagcttgaacgaagaatcttttcctgatatttgcagagtttaattccatcttgtaaagggaaagacatgttttcatacatttatacatgttctttcataaacaccttaagatataatatttgatttccaattaagttgtaatcatgcctacaatgctttccagcttctttctttcaaagctccccatttactagctgttgtccatttctcccgctttctcttttcacacttcacaccttccactctgagagtcagccaaatggaacaactttttgttccttaaatgggtcatgctttctcttactttttactttttatttttttccttagtcttgtgcatgctgtttgctctgatagaacacattgttcacttctctgtttctactcatttttcaagtcttagatttttgtcattaactttttcggggaattttattcttctaatcctccctacaccccagcacaggctgcgagtatttctattgcatttgtactgaaactttcatcagaatttatttcactcttgccttgtctacatctctctctgggctgaaagctcctaagggtaggactgtgttcgttcactggtaaatatttcctttttaaacaaatgcatgtattcaagtataacctacaaactgaaaagtatgtgaatcctaagtgtacagctggttgagctttcacaaaatgacatacacatgttattaccacccacaagatattgtcagttccctagaagcgcactaccaccctccacctgtaatttatgctctctgcaagtcactaaccactaacccctctttctcctcctgtatgtacccaaagatagtcactatcctgacctctaatgccatgaaatgattttgcctgttgtattagtttgttaaggctgtcataacaaagcaccacaaaatgggtggcataaacaacagaaatttattgtctcatggttacggaggctaaaagcccaacatcaaggtgttagcagagacagttccttctgagggccgtgaggaagaatttgtttcatccctcttccctaattcttggtggtttgctgacaattttggtatttgttggcttgtagaagtatcagcctgatctgtgccttcatattcacgtggtgttttctctctctctctctctctctctctttctctttctctctctctctctgtgtatgtaagtgtgtgtgtctgtgtctgtgtccaaatttacccatttaataaggacacttgtcacgttggattagggtcacacactattccactataacttcatattacttaattacatctgcaatgaccctatttccaacaaaggtcacattttgaggtgctgaaagtgcggtcttcaacatttgaatgtgaagtagaagagataattccacccataataactatttttaaacttcaattaaatagaattatataccatatattcttctgtgtcatcttctttgatttgctattacattaatgcaacttgtacatattgtgttattagtcttccatttctttctttatttttgtttttcttttcaagatagagtctcactatgttgcttaggctagactgaaactcctgggctcaagagacccttctgcctcagcctcctgagcagctgggactgcaggtgtacaccaacatgctcagttccattcattcattttgattgctatactgtgttccactgaatgtttatgccatatatatctatgtgtctatgtctacatttgtagctatctatacctatgtctatatcatctatatctatatagccattctactggaaaggatactagagtgtttacagtttggggctattaacatatagtgctactataaaaatttttgtacatggattttggtacatatatgtaagtgaatatttattgaacaattgaattatgataaggcaggaaagtgatttatttatactttaatagcattcctaaatgaacaagtgtcaaagtttgggtggaggaatcaagtgtttctctaaacttgcttcttagaatattagttttgtagcatcttaatgggtgtcactttctaaaaaagttacatgactgaaaacatttggaaatattggactgaacaaattaaaccattttgtttgttcttcttatactgcaggattttttcaattgccttttttttcccctagagagtaaatgtgaaagacagttctcatatttgacagggaagctctttttgttttgaggaagatatagctaggaccaaaattctagtaggttctatactttgttactaaatgggtactgggttattatctttttaaattttatattacaaaatatttggtaaattacttaaacctaagagtgtcaggaggatgaaaagatggtttgcattatagtacatttgctaacttaagttttcacgtttttgcttgtttgggggctattttaagtttcttgaggtattgtttatatttcattgataatctgcatttttagaggggaatctctcatgtacaggttttctgtgttaaaaaaaaggctttcactataaagagaagcctcaaaacttagcaagagtactgatcaatcaaccacagctaaacacatgttatcattttactgatccccagtgtgattaatgcttaaaaaaagaacaaccccatttaaattccctttgcaacttcatttgttgtagcacaatagattaaaggcttacaaaaggagttgtttctattgtctatcttaaaagaattttaattaccaaatgcattaaacttttatattaattaagtggttttgggttgtagtcatccaggcatcagcactattcctgatgtctcattttgctgactgcaggctgaaggaaagcttgccccagacacagcaacaggacccaggctgccaagcagcacagggccaaacaaaagggcttgcacctcaattaaattgaaagtctctgagctgctcttgcaatccagatggcaagtaaattcatatcttcaggagggatttaattaagatatattcattgcaagcatgaagccaggaattcaatctcaagaaagcttaaaaaattgcagtggcactttaaaaataactacaatataagtaggatctagaccactcaaaagtcaagggttctgttctagacaacttaggagtctggtgctttaggctagtgtagtcaacttcagttttttttattggtggttaaaagcaaaggctttggaattagacaaatttagtttcaaaggttagccttggcaatcactaattctatgacttaacttttcctgtagcttctgtttcttcaactgttggatgagtataacacctacatcataagatttttgtgaggattaaacgagaaatatcctaatgattctcaagtttgtgtcattagccctggtcatttcctcatctagtcatttcctcatctccaaaactgtctaaccacttatttgacatctctacttggatttatgatagacatctcagacttaaattagctaaaacaaaactgtcgattaccccaaacccagaacatgtgtgtcccagttcttctcacttggaatgcttccgctatccagccagctgctcaagccaaaaagccaggagttactgttctctttccatgttctccctcaaacaattctgttaactccacctctgatatatatcttgaatatctggaacatgtcctctttttttctatctctattgccatcacattggtacagtgttttccaagcttagtggtactgatattttggaacggatagttctttatcatggggcttgtcttgtgcattgtgcgatgtttagcagcatctctgacctctattcactagatgtcagtagtgttccccaagttgtgaaacaaaaacgcctccagacattgacaatcgtcatttgggagaaacaagtctactctagttgagaactgctgtactcatacaagccatcatcccctcttgacagaaaaaatcaccatcacaaaactcacttgtggtattttatatttgtttttatttcgtcgatccacttaagtttttctgttttataatcatgtgattcatcattttaaataaagataattttgcctccttttaatctttaaaatgtttttcctttgacatttattatacattctggtatctattgctgcatatagaaactcagacatatggtttgaaacagcaataatatttatttggctcacaaatctgcaatttgagcagcagttggtaaggacagatcatctctgctctgctcagggcagcagggatggctaaaactctggacaatgggctgctttgcaacatggtagctagcttccaagacacagtccctcaaaaaggagggagccacgtggagccaaattgctcctcagaacctaacttcagaattcaaacggtgtcacttctgttgtagttttatttatcaagagagtcacaaaaatattctatctttcagtggcagggtaaataatctccaccttttaatgagagaatgacaaagtcctagacaagtgtattgaatctaaatgactcctgtggccatttttagaaaatactacctgctacactattattttaagatgaattttaagttggaagtttttgttttgttcttaacttagaatgtatactggctttctgttctatattacaagttattacagacttgaggcttaaaacagtaaaaatttattctgtggtttctgtagatcagaaatctgggctcaccttagctgaattctctactcagggtttcgtaaagctggaattaagctgtcagccaggccgcaccctttctggagataggagtccttatttaagctctcatgattagtggtaaaaatcagttctgtgtggctcggggctgaggaccctgttctcttgctgtttgtcagctggtggatctcctagttcctaggatctgcctatagctccttgccacatgtgccccacaagctctccattagaccctcttacgcttcaaatgtatcttccagggaagttccaggtgctcttatgattaggacagcctcatttggaggatcttccttttgattaacttaaaatcaactgactagtaaccttaattatacatacaaaatcccttttgccatgtaacatggtacaatcaagggagtgataccccttatcattacaggttttgactacactcaaagggaggcagttgtatgaggtatgaacattaggaagtagaaatcttggggtccgtcttaaaattctgccttccagagaatgtttataacatttctccattaaacaatgctaattcggggtttgagatgtatgtgagtacgtctgtctgatataaagggtatctatttctatttcacaatacatctttgtcttgtgaattattatgttaaattatattaatatattttcaaattttatcaacttgatattcttgaaattaccttacttgatattactgaattcttttgtactataattttatttaggagtttaaatcataatttgtggatatccttgatcccatagattccttttattgtcctgtcttttagtttggggaccaatgtcatgtggaactgtgaagaatttcccatcttatactttgagtgttttaaacagcaatggagttttctgttccatgaatgcttgctaatatgtacctatgaaaatatttaagcctagtaattctgtggaattttttgtaggaatggaagtagatttcttaattttttttagattctcctctggtaaaacaacttgttttgtttttctatttcagagtcagtttggtaattcatgttttaaaaatatgtttatttaatcagatttttaaatatagttgtatacaggtgagacaaatatccaattttagaattgtttaatcttttaaaataaaaagttatttcaccattcccatttctctctctctgtgtgtgtgtgtgtgtgtgtgtgtgtgtgtgtgtgtgtgtgtgtattttggaagaaggggcaggaaagagtttttactgaagtgttttctattaagattttttttttttttttttgagacggagtcttgctctgtcacccaggctggagtgcagtggtgtgatctcagctcactgcaagctccgcctcccaggttcaccccattctcctgcctcagcctccagagtagctgggactacaggcgaccaccaccacgcccggctaattttttgtatttgtagtacagatggggtttcaccgtgttagccaagatggtctcaatctcctgacctcatgatccacccatcttggcctcccaaaatgctgggtttacaggcgtgagccaccgtgcccggcctttattaagatttttgaaggatcagctctttgatttatttctaccattttaaaattcaccactttatctttgtatctgtttatttttttcttttatttttgttatttaaactaacattaaaacaagcctatgatgtaagtaggctatttgtacccttttgcaaatgagaaacctgagacctggtgtgatggttgatattgagtgtcaacttgatcagattgaaaaatgcaaagtattgttcctgggtttgtctgtgtgggtgtttccaaaaaagattaatatttgagtcagtggactgggagaggcagactcaccctcaatctgggcaggcaccatctaatcagctgccagtgtggctaggataaaagcaggcagaggaacatgaaaagaccagactggctgagtcttctggcctccatctttctcctgtgatgaattcttcctgccctcaaatatcggactccaagttcttcaacttttggactcctggacctataccagtggtttgccagggtctctcagaccttcccaccgcaaactgaaggctgccctgttggcttcactacttttgaggttttgggactcagattggcttccttgctcctcagcttgcagatggtgggacttcaccttgtgatcgtgtgagtcaatatgccttaataaagtctcttttatgtgtacaactatcctattaggtctgtccctctagaaaaccctgactaatacatctggggaggctgactaacgtgcctatggtcatagtcagtgggtggcagagcttaaatttaaatccaagcatttttgctccagaacttgagttgtcaacactaatgtctgtcttttttgttttagccattctagtgcatgtgaagtggaatctcattgtggttttgatatgcatttccctaatgattaatgatattagacatcttatcttgtgcctattggccatttgtatgtcttctatggagaaatatctatattcaaatagtttgcatattttaaaatgtggttgtctttttattgttgaattgtaagagttctttatatattctggataccagttccttatcaaatgtatgctttgcaaatatttttttccattacatgggttgtcttttgactttcttgatgtcttttgaatctatgctttaatattgatgaagtaaatgtcttgcttttttcttttgttatttgcacttttatgtaatgtctaagaaacattgactaatataagaccacaaatatttatgtatgtatatttttctaagaattctataggtttagctcttacatgtaaatctatggtttattttgaaccacttcttttatatgatgtaagattggggttcaacttctttcttttacttgtggatatctagttgttctagtctttggtgttggaattctggtaatacaggccttagagagtaagttgggaagtgtttcctcttcatctttttttgcaagagtttgtgaagaattggtcttacttctttaaatgtttgacagaattcaccagtagaaccatcaaaggctgtgcttttctttgtaaaaaattttttgattactaatttaatccttacttgttggaggttgattcagatgttttattttttcttgagtcagttttggtacatttttgtgtctttctagaatattgtccatttcatttaattcattaatatataattgtgaattatattctttaattctccttatttttgtaaggtaactagtaatgttccgtctttcattactggtttagtaatttgagtcttctctttcttgattaatctagctaaagttttgccattttcttgatcttttttttttatcttgatctatttatctatctttatgccaagaccacagtatcttgagcactgtaactttgtagtaagttttgaagtcaggaaatgtcagtctttggaaccacatgattcaaaatacaacttctttttaaaaattgtttctattgtttttctattcttcatttatttctgctgtaatctttactttcttttgcttatttttgtttatttccactgatttatctaattttttaaacggataagtttaggtttttgattttaggttttcttttaaaatacgattaaaatatgatcattttttagatatcagtttctctctaagcaccacattagctgtattccataaattttgctagattagtttttattttcacccatctcaaagtttttctgaattttcttgtgattgattctttggctggtttgttatttgggagtgtgttaattttcacataaatgtaaattttccaaatttccttctgttattgatctctagctattaaatccagttattttatggtgttgttcgattctcgcatttcagttttgaattttgtactagttgtgcccattattgaaaatgaggcattggattttgcattttctttaattgtctatgtctctcttcaatcctatcagttttaatttcttgcattttggggcttttttggtgcatgtatattttcatttttttatgtctttctgatggaacgactcctttactgtcataaaatatctttttttctagaaataagtttttgttttaaagcctatttcgatataagtatacccactgctgttctcctttggttgctctttgtatagtatatattttttcatcttttattttcaattagtttgtgtctttcaaactaaacttgtggacagaatatagttagatgtcacttttttccttctgctagtctgtgtgttgattggcatatttcaagcatttacatttaatataattgctgattaaacagaatctacatctgccactttaatttttattttctataagttttatgtctcttttgtacttctctattactggcttatttggggttaaacaggtattttctgtgtactgtcttaattccttgtaatttccgtattattttatctttttattggttgtcctggggattacaattaacgtcttaatttataacactctatttcagttaataccaacttaatttcaattgtatatcaaaatttcactcttacataacctcattttctctctatcctctgaactattgtcattcatgtgagactttatacattataaatccaccaaaatagttatctatgatgttttatgcagttgtcttttaaattagttagaagaaaataattacaaacaacaaatacatttatattgtctttaactgagacagttaactttactagtacactttattttcttcatttggatttgagttattgtttagcatccttttattttagcttgacactctttctttagtgtttgtcgtagggcagttgtactagtgttaattctgttaatttatgtttacctggagatatataaatttctcctttgtttttgaaggataattttgctgagtgtggtatttttctttggcagtcttattttaggattattatttcaattattttggtaatttataactccagaatttgtttttttttttaattgatagtctgttttatgagacattgttctcatactttttttttttgttcttcagacatggttttctttagtttttttttttttttttttgagacggagtctcgctctgtcgcccaggccagactgcggactgcagcggcgcaatctcggctcactgcaagctccgcctcccgggttcacgccattctcctgcctcagcctcccgagtagctgggactacaggcgcccgccaccgcgcccggctaattttttgtatttttagtagagacgggggtttcaccttgttagccaggatggtctcgatctcctgacctcatgatccacccgcctcggcctcccaaagtgctgggattacaggcgtgagccaccgcgcccggccttctttagttctttcaacatgtttataagagccaatttaaaatctttgtttagcaacttcagtgtttggatatcattagggacagtttctactgattcattctttttcctggtattgggccattcgtcctatttctttgcatgtcttacaattctttggtggaaaattggacatattagataatatggcatctctgaaaattagatacttctcccccatattctcttcagtttttttttttttcttttttttgctcttgtagttgctgctgctgttgctggtctgtattctttgtcatatgtgtccactaggtctcttctcagttagcttactggccagctaatgattgaattggacagagttttccttaaaagccttgaaagtatgtctccttccttattccaagggactctttaagagtgttggtgcataccttcaatgctccagcaatttacaactgtgccttaatcttcactttctacctgtacagatcctcaagattagccacatgtgagaagatagggactttccatgtctttcctaggcaggggcacagccttacatattttcatgaccatttaaattcctaagaatatgtcagagtttttcaaattcccctatgagcatctcatcccacagcttttccttttatttttttttcttttgagcctcttatttgctccagttattatccctgctttaagcaggtgttgtgttagacagttgccactgttttacttttctgacaaaccttaggaaaatgttattcacagtgagtgagctctgaaccaggttaaataaagacaagtcctgtgagtggaggtttccggagagcagccagacaggtccaataatgatatttctctgggaataagacttttgggtttaaaacagttctaaacctcttttgccccaatcagtggctgctaggctagagttcttatatctaactttattgtacacctatttattttttcagggtcacttcagaggtagagagatagctatgggattaattcacattgaaatacaacaaagacagctttccttacccagattcagccattttttttttaatggaataaacattcttcaaattggtactattttggttacttacagagttttgaaaaagttgattctgacaatttttactagtgttcttatcatttttacagaagagtggatcttcagaagtccttgttccctcattgcagaagtcccatcttctatttggttttctatgctgtgtaacaaccaaaaattttgacttaaaacaacacccatttattgcctctcagttaataaaggtcagaaatgtgagtactgctcaggagggttctttgctcagagtttctgaaaagctgaaatcagggtgtcatcttggggtaggttctcatctggagctgtggtcctctcccaagcccattcagtttactggcagaatttagtttactggtggaattcagttccttgcagttttagatctgaggctctcagctcctagaggccactccacgctataggcagttaagaacatggctgcttgcttttttaaaaccagaaatataatatccctctcacttcttacgtctctgacctctataccctttgttaaaaagcttatctgcttatgcagcttcatccaggataatatctccattagttaacctaaattcaattgattagagactttaattacaccttctgaatctcttcatctttgtcacttaacacgatatgatcacaggaggaatatttcatcacctttgtcatattcatttttcaggagcaagttataggtcccatacatactcatgaagaaggcattatccaaggtcacgggccattgagattgtcatagcatcctgtctacctcctatagtaaattataagaagtttttattttgttaatcggttcagtcattttaatttatatttttgtatcttcataatgtaataatcacatcaagcattactatagagtaatagcatactgactatattccaaatgacaaatgtagtcaaaatctaatgctcagtgtgacaagagcaagttcttgtaaagtatggtcttttcagggcttgcttaggttggggatttgctattgattacacaaatatattttgctgctttaattctgctctcaaggccttagtcaataatcaaaagtctatgctatctacattggtcttcttccaatgtaaatatattttcttgctacgggatgagaaaatatttatattgttaataccaagtttcccatgaatgggttattttctcagagtgttttatatgaggagcaatgttgagcttcacaggataaaggtatcccttttagatgtaagtaaaggctaaattaaaaaaaaattatgcaaccaaatgaaaattataatgtacatgtttgacccaatcttgacttgtttgtaaggtacttataacactactatttatccctgataaaaattttaaaaacgagtttctaaaatgaaatgccaaaataccttcaaacagaaaaaaatctaaataaccatccgtactgttcataaatagttttttggcagggaggtagaaggggaaacaaatacaggatatatatatatatatatcttggtgtatatatatatatatatatatatatatatatatatataaaatcaagtctctcagagtagtggtgtttcagttattttcatttacattatcaaaggaaatcctgtgttcaaaaacaaacttaaaaaataatgtaacgctagatatggagattgtatttgaaaatcatatatacatagcacacaaaataattttttcttgcaatttttttatactaggtaaagtgctattccaagaattggattcgatatctactagttttctttgaaatttaatgctaaagtttgaattaaatgaaatttttatgacatcaataattctaaaattctttaaggactacattggattataaaacacagtcactcttagccattaactttcatacttaaggccaagtttataagcttttcttaatttgtcattttttgaagatacaattattgctgacagggcttttggagataactaatggatgaatgtatgagtgtgcaaaaaatatgttaaaatgattaaattgattttttttaatcagaaagaactggaccagaaagttccacttgaatcaattagggaaacatacactcactttctaacctggcagagcttgtttgtcaggcctggacaaggataaaattgtaccttattttgtgccacagatgtagttctgagggtttacttgtgctttgtggttttgcagatcaaaccaaatttaaaatagtaagatagatgcctagatataaaggcattttagcaaattcttagagtaaatcattgtggtttagcatgcagactctgaaaaagtatctgtgctcaaatccttgattttccactttcagctatgtttcttttagcaagacaaacttcccccttgtttctttatttgtgaaatgcatataatactagttgatatcccatacatttgtagacaggattgagttaattctgtgaagcacttagactaatgtgaatattgtatgaactggttattatcttctgttaaaacatttactttatagtgtgatttttctgcttttatgtattgaggctctctaaattgcagtacagatgcattaatgatacccagtaaaggaatcctcatttaccatggtatcttacatacccatccagtgtctttttgtctttttcatctattcattcatttggcaaatattttcagagatgccactgtgtaccaggtagtggtggctcatgcctgtaatctcagcactttgggagaccaaggtggatggatcacgaggtcaggagtttgagaccagcctggccaacatagtgaaatcccatatctactaaaaatacaaaaaattagctgggcgtggtggtgtgtgcctataatcccagctactcgggaggctgaggcaggagaattgcgtgaacctgggaggcggaggttgcagtgagccgagatggcgccattgcactccagcccgggcgacagtgcgagactgtctggagaaaaaaaaaaaaagaaagatattgttccttccctcctggaatttataatcagataaaggagacagatgaaaaagtaaccaataaatggaatacagcttgtaacaaattatatggaacaagcaaacggtactgagatagagagtatcaaaagagaggctgttactggataatctggaaagtcctctttgaggagatgacattcaaactaaccttgaatttttaagagccagagagtggctggcaaaggattctagacatgtgaaagaaaggcatgaaagaaagaccctggcttgtgaaaagagctaaagacaacatcattgtggcaatggagaaaacaaaccttttcttttggtgaagggattagaagttcagttttacaaatactaattttgttaagtgttttagacatccaaagagatttatagtagtaattaaatatatagatctaaaactcaaaagagtctgaggatggagaaataattggaaaataaagacatgccggttatatttaaatccatatgactgaataagatcacctaaggaacaagtttataaaaagaagatcaaggactgaaaaaacaggaacaaaaacatttagagataagttagaagaattggcaaagaaatatgtgaaaaagaagcttaatgagattaagaaaatctggagagtgtgaggtcagctactctaggtccattattagggatacagttaagaccttcatgtagtctgttagttatatctgtttcataaaatcaaaggctagagcctcttaaaacagtatggtaagatttcatgttcattgtgcatatctatatactatagctaaagacatcaatagttactataaacaacagataaaaatgaacacatataaatgaacttcatgatttactcttgttctaagatatgcataacaaaatgtaccattgcctcccttgtgttggcaaatacaattaattccttcagagtagcgaagttttgtttgagttttttgaagcttgtttatctaatgctatctattgtccttgagttcaagcaaaattagtattttttccaaagattaaaaactattgcagaaaagtatgcttgaactaaatgtattttcagcccaaggataagtagattcaactttagtggcaatttgaaaccaaaaagggtttattgaaatggaggaatgttatgatcaaagatgtaatttaggaaaattattttatagataggatgaaggaggggtaggagaagagaaattggaggcaagagtacaaggatgatcaagaggggatgaacatgtgacccatgagacaggcaacataaggaagacaaaaaggaaaataaacacaacattcattgcagaaagaagataaaacttaattataggttgttggggtaagggattagaaggaatccattatttgcagagagtcttgagctatgaggttaataacaaaatgttattaaaattatattaaaaaataaagaatttaaatcaagaatacaccacaatttctgacttcttcatcaaaaaagtccaaagtgtgataataattatacaaataataacactaacaagggcagaaattgctatagtattcagtatatactaagtaccacattaagagaattaaatatattatggtaaatcctacaaatgcaaggcaggcattagtaaacctattttgtggtttagtaaacaggttgaaaaagtttatgtaaattgtttaacattcttaaacagcaaataaactgaataactgagatttaaataatccagtttcttcttactctagagtctagctctttcctttatatagatatttattgtttgcttcttttatatttttctgtgtatgtagcttcagcataattcatggcacacaaaatttacaaaattatattttgactttatctcaatggaatccatgatgatctgacacattgggcaatttagtatcaatctacttcacaaacaaattatcttttgacccaaaattgaaatgcacagatacttcatagacagagggataatgccagaaaatgtgccaacatttgtgaacaaaatcgtaccagtctagtcaatgagttaggtttctttaggttaaactaattatcaaaattttgttcactttaagatttacttaatgttatattatctacttgacaacattaatgaattatttaagatacactttgaagaaaaattaactgagtttattccattggtttagagtggcacatcactggtaaattatttataatacattttcaggaataaacttgagtttattcaactggtttagaataaacaaatttgttaatctttgagaaagctatttacttggtccaaataaaaatatctattttcattgagagcactgctgtgatgtttctcaatattttcatttcctctccaatttccacagtagatctaaccttgagaaattcgcttgggataagtattaggcatcagtctcatggttgctaataattagcttagaggtctcctagttgattaagtgtaaagccaccacttttacaatataattttctaatatagttcaaattatactttgtgatataaatttcctaactatataccagacacaagttaattattttcatgaggctgtttgaaaagtccgtattctacagtatttccttagattttatgagttttagtgacatgaggtgacagtggtaactacaggtactattttctgctttgcagtagtttgctttatctttttcctttccatgtccaaaagtaagtttttatttcagattatcacaattcatatcacactcataactacagttgaccactgaacaatgtggtattcattgctggccccccttccagttaaaatttatgtataacttttgactccccaaaaacttaactaatgaaagtctactgttgactggaaaccttagtgataacataaactattgattaacacatattttatctgttacatgtattatatactgtattcttgcaataaagtacactagagaaaagaaaatgttaagaaaatcataaggaagaggaaatacattaactattcattaagtggaagtgagtcatcctacaggtcttcatccccaccctcttcatgctgagtaggctgaggaggaagaagaggagaaggggttggtcttgctctctcaggggtggcagaggtggaagaaaatctgtatataaatggcctgtgcagttcaaatctgtgttgtttaagcatcaaccatagagtttagtcatgtatgttagaaagtgttgtggttatcaattgtttttgttactgttgagtttcagctttgatacacataccctatttgtttactatgggattgcatcagaggatggagccaatagagtaatgtcttctggaagtttatcttgtttcttgccagttttccaaaaccctttcttctgttgataagaattaaatattgttaaaaagaaagctaaccacccccaagcacataaacttatccttgatattgctttcaaacctttgaaacctcaagaaacttgaggcctcaagttgaaaaccgccatttgtggagttttgaggtggtgcaggacttacccatttgctttggaaaaaatctcggtcaggtttctcctttggtctctatttgttccacttgccctttgacccacttgacccatttctgtctttagtccaaacacttgggagtcagcctctgttcgtcgattcctgtcttaattactttgtttttcagaataccaccttgaaatcatttctgtcattctactcaccattttgaattgattctatgtggtttctggtttcagatttgctagcaccaacctaagccagttacggctcttgctttagtatttctcatcagcctactctcaattggtagaaacttttgcaagtcctcttatttctaccactctagagttgtggcagttttaccctttagtcaaagaacagcttttggggataagtaaatcaagaggccttcactttatcttgattctcctgttcttgttggtatgtagggaccaattatgtctgataatgacctttctttttcctccactctccttttccttgtacttcacagaggactcatgagatttctaaatgtaaactctttacacaagcaacatcaggaatgtttagatatatatttatgaataaattaaaatgtctaaaatatttccattttttgtcaacgtacctgtcttaacactgtaatttttaatttttgttgacaacatatgaccttcttatttatgtattttaattgtgacattgtttaataatttttattaactgaaacaaatttgaagcatttggagtgactatagggtagatattaagggtatgggctctagtgataccatagctctgctactttattctgcttcatatttcacatctataagaagataataatagtacctagtttatagtattgttgtagggattaaatgagctgactcatgtaaagcaccaatgcctaggttatagttagcattttgatgaatgttaacttctattattagtattggtaacatcctttttgtttgtttgtttttgagatgggcttttgctgtgtcaccaaggctggagtacagtggcataattacggatcactgcagccttgacctcccaagctcaagtgaccctctcacctcagcctcccaagtagctgggaccacaggcacgcaccaccacatccaactaatttttatgtagagatggggtccactatgttgcccaggatggactcaaacacgtgggctcaagcaatcctcctgctgggcctcccaaagtgctgggattataggcatgagctactgctcctggtcaattattggtaacatcttaagacaaagctgtactttgagaaactgcatgtttcctgttacagaaattttttaaaatccacagctcaaagtagaagtaaccttgtatcttcttacggtacattattacgtagttattaatttgcctacacaatattatctcagaaggactcctgccaatgtggatgaggcattgtgtgttgctcaagatcccagtgttcacccagttggtgcaaataaatactggagcaaattctaaacgtgtgatcaaacagggtgttttaaaactagttacacatatttatcaggctactgcaggggaggccaaatattgtttaggagtttcgcatatggaatcagctagaattaccttcatcttttctgctctttactaggcttataaattggggcaattaatcaaaactttttgaacttcaatttctccatgtgtaaacatattaataacacttatttgtcagaggattgttaggagtattaaattaatttgaatacaaaatgctaagcctagaacatagtaaatgctaaataaattataatcaatagcaacagatttttattagtagtgtcattactagtcaatgttactaatattatttaggcatttaaatagtacttagagtacttgttattatttcttttattcctattcctatttattctcaggtagggtgaagtgttatgaataggaatgtgaagggaagggtgatatgtaatttaacctggcacaaatgaattgtgaactgttatgtatatgttcatacattatcacattgtgaaagtgttgcactggaatataactcacatataaaaatcacccatttgaagtatataatttaatggtttttagtagagttgtgcaaccatcaccacaatgtagttttagagcattacagtgcatacaaaagaagccctgtaactattaatcacttttttgtttgtttttgtttttgtttctgtttgagacggagtctcgctctgtcgcctaggctggagtgcactggcgggatctcggctcactgcaagctccgcctcctgggttcccgccattctcctgcctcagcctcccgagtagctggaactacaggcgcccgccaccacgcccggctaattttttgtatttttagtagagacggggtttcaccgtggtctggatatcctgacctcgtgatccgactgccttggcttcccaaagtgctaggattacaggcgtgagccaccgcgcccagccaagaatcacatcttattctccctcctcctaggcaaccactaatcttcattctgcctctacacattgaccattctggacattttatatgaatggaatcatatagtagatggtctcttgtgactgacttctttcacttaggctaattcattccaaggctcctccatgttgtaacatatatcaatactttatttcaacacttcatttgtttttattgctaaataatattccattaatattccatcatgtgcatatatcacattttttaatccattcttcagctgatgggaatatgagttattttcactttttgaatattattaataatgctgctatgaacatttgtgtgtacatttttgtgtggaaatatgttttcaatccttttgagcctataccctaggaacagaattgctgggtaatatgttcatgctgtttatttaaccttttgaggaagtgctgatgggagagtactactttaccctcccatcagcaacatacggtatcaatttgaattgatatcagcattactttgaagactactcttgaaatttaatatgagtaaaaaatttgaggttcagacaatttaagatgatcatccatggctgtatcaaaagaataaagtgaaggcagaagtcagggtttgagcctggctctagctggctctaaggcctgtgctctttctccactggcataaaaagtcttcaagaaacattagccggtaactatgtctggtgatgaatgtgttaactgacttgattgtggtaatcatttcagaatgcatgagtgtgtaaaatcatcacactatacatcttaaatatgtacaattttgtcagttctatctcaataaagctggaaaaaaaggatctgttggtccttaattttctgtttaaaacacactttgctttttatgattttatgtcccatagtttaataaagcctaataaaaatacacttatggaaagatgtaaaaattctattttaataaatcccatatctcagtgggaaaaaaatttatgcccaatcagttttatgtaaactgactccaaagtaaaagtaagtgcattagtccttcctagaactactttattcttattttttaaaaaaatacaaggtgcaaaaaaaatccctgtttattctgtcattctgtggaacttagtcacaatgaagtattctgggtgctgctgcctgccacccactctctccacatttgtgctacaagagttagtacaacccaaagtatatggaggtaggccaagagggtagcttcctgccactgtaattctgaggtcataaagcctatatcatacaaggcttatcatgcagaaaagaaggaaattctcccttattgattaaatacaaaagccactttgaaaagaggacaaccactaaaaacctcattccttttaaaatacactttaaaaatgtatttagaataggtgcatttggggatccctttctccaagaacacacttcactctcccccacatctgtcatcaggttttttggggggtggcccctaaaatacttgtttatattatatgcctatgtttatatgatgctattatcttctaataggagattgaaccagggcttggctcaacctatgccaaactgtcctgctttccggaaatttaaaatcaggtttaagggattctagctgccatttgggataaattgtgcaaattaagaattgtggcaaactgtcttctaccatgtcatctaagtgcctctgcaccttgtacatgaagatgtacaaagtagaggatttgaagagattccagtcctccttgagaagctgaatctcaaagctgcctttgatgtttgtgagatgtccttgatttttcttaataattttctctttttttccctgggataccttgaatttctgttacttataagcaaaaaacattgattcaagttgcctagatccagaaaaagaaggaagtaaggcttttccccattttgttgtggatttgcagatagatttgtgccacaaaatgtcataattttatacacactaatgtaacaaagagaaatcttaacgagatcgagtgtttttcatggttcacttaagtaactgggggaagaggccacagagtaaggttggaactctgtgttcaatattcgaatctgaagaaaaagaaacgatcagttgaatgttgtggtgatctgtatcatttgaatgtgaactttcttttgcaacagcgaagttctagctttttgaaagtctgattgttttttagcctgaaaacacattccccatgacttttttctttttttaaaaaaacctcattaaaagtgtagtattaaaggtttacttttcaaatgcttatttttactttggactcaaaatgagatttaattacatgaattgtgatttgaaattagtttactctttctaataatagacttacagtttcacgtacttttctaattttgtattgctaaaaatagcatacaaagcatcctaagaaaatcagtaatttgatgatttggggaagaaaagcgattttgagtaaagtaggtaactggaaatgatatttctgcagaggtgactaatttcagtgtttgaaagtttcttttatataaatacatatctgtaattttgaaaatgtttgaaaaatattgaccttatgttttgaaacacagaatgtatgtaaattctttcagtataatactaagtgaaatttagactgatgaggaatttgagaaaaatcaagttaaaatgcttatattattaatatcatatttttgaagaattaaatgatgataggaataagcacatttggtttcagttttagagagtctgaaataggcattggtttaaaaatatgtgtttgatataaaatttctacataatccccaagtatataaaacaataaaacaatgtggtattctaagttgaaagaagtctgactcttaagttctaagtcatcagggctggacaatgcccagtattgaacaccatggagggagaaacttctgtaaagtttgcaagtccccagatttgaaggaatttttggtttttagtacatcaggggcagaggtgggccaaccttcttctatgtcaactggagacagggattttcaccaagatttctaaagcccagtaactggtatacagattccctaggcacagcttgaaaaccattcctatctggagagctgcaaacaaatgggacctagttcttcgttatttatggaaactttcaaaccttttttatcaccccaagttgcaaatactactcacagcctcttttcttggttgagtcacttttctattgttcagggaactgccagcaacaacttgtctctctctttttttgttttatttttatttttattttctttttatactttaggttctgggatacatgtgcagaacgtgcaggtttgttacataggtatacacgtgccatggtggtttgctgcacccatcaacctgtcatctacattaggtatttctcctaatgctatccctcccctagccccctacccctggcaggcactagtgtgtgatgttcccctccctgtgtctatgtgttctcattgttcaactcccacttatgagtgacaacatgcagtgtttgcttttctgttcctgtgttagtttgctgagaatgatggtttccagcttcgttcatgtccctgaaaaggacatgaactcattcttttttatggctgcatagtatcccatggtgtatatgtgccacattttctttatccagcctatcattgatgagcatctgggttgggtccaagtcttttctacctgtgaacactgctgcaataaacatacgggtgcttgtgtctttatagtagaatgacttacaatcctttgggatccctcttttgtcagtagatctccaccttccaaataatcctggtggtggcttgtgtgagtcaggctccttcagttgcacagtacaagatcaaaactcaaacttgtttaggcacataaagggagtttaggtgtttcatctgtttgggatcctgtaataaaatatcacagactggataccttgtaaatagcaatttatttctcacagttttgaaggctggaaagtccaagatcaaggcaccaacagatttggtgtctggtgagggcttgcttcctggtttgtagatggctgtcttttcactaaccttatatggtagaaaaagactagctagctgtctagggtctctcataaaattactaatcccattcatgagtgtgtaaccctaatgacttaatcatctcccaaaggtcccaccttctaataccatcgccttagtgattaggttttaacatatgaattttgagggtgaggaggacaagcacattcagaccatagcaattgccttaataaagtaggagctccctaagtacccctggctttaggcatgtttgtaactaaaggttgacacaacatccatttctttctgctctttgacctcattttctctatgtgggctttcttctccagcagaacgaccctaccgactgcagaggtggctctagcagcacttagctcactttacttttagtttttgcaaaagtctcagaaaatgttctgattggtctagaatataagctcattcctgaagtgaccgctgagaccagggagaaaaacgtttggattggccaggccaggagacacggcataggacaaattccatcagaatgatctgaataaggaaagaagttgctccttagggaagaaaagttaaaaaaaaaaattaaaaaaaaaaagtcatgttcactgctgcagggctttctttagcagggtcccagaaatataaatcatctgcttatgtccctttgcttagaccaaaggctttaaatttagagcacaagtgtttttggctgcttgcataggatatggaggggcaaaataccactgattctttgtctcttttagtagtaaaatcaaaacacatatttacatttcacttggttaccttgtagttttaaagtgaagtgcatactttaggagtctcaataataccaaacattgaaagcattcgatttgttatcattttgcttagagtcatattaaatccacacaataatatttctaggttaggttagaatcttaatctccccaagacttatgaaatcaccttctacctggtggatatttttctagtgactcatttttcaaattgtgtttgaatggttgctgctattttagataagtcctaataatgtccagctttaattgtgaataaaataaaatttatcttgcatttattatattccaaaaacattcaatgctctagggctattggtagatggtaccatgcttttgaaaagttttcaatctgttgaaaacaatagatttatgatcatataactaacagtaaaagttactgtactataatacagcaaaagtcagcaagtactgtaagcaaggtaaaaatgcaaagtttgggcagaatagagtggaggattatctgagggttctcattttcaattaaatagtattcagaatttttaaatgacatttctaggcttcattcaaatcttcattttgagtttgccactcctttgtatacacccagtgttctagccagataagatagctggcattgaactaccatcctaaactgtactcctccttgttcattcttctcttcattctgttccttcatcctggactgtatgtcccatgtcaagcccactctgataccttcctttaatattcagctcaagcactttctcctcctttaaggtttccattttacattttggatttgatttctctctctcatgacaccgtcacattttctgctatttcccatggcatttatcctgtcatttttgcgttataattattgtgatattatagtttactgtttccttcttcttccatccacttagacctcttacatggttccttctttaataatagctctcaaggctgcctctttttattgagaaaatagaagttgatggatgttttcttatattcccagaagaaaatggccatctatactccacctttctttctattacctgagatgaaattatctctgttctattgcaaatctcattcctctatgacttaagtgctctgaatatgaaatcatctctgctgcccttttatcattggttccttcctctctgtattgttttatttccattagcatataaacatttttgttattcttatcttgaataaaagatgcctccttgacttgaagtctcatttaagctatcatcttttttctttgtttaccttcaggcaaaacttcttgaaagggttcaccataatctttttctgtacttcctcattaccaaactcagattagtgagtttggaatgaccccagcactacacgaagattatgcttgtctaggttgcctatggttctaaatccaacatacttttccctttccttttcttgatattttagcagcctttattaaaattgatcattttttttttccttttggaagcatacttttctcttggatttcatcacaataccctaaactttcttattggctaccccatgtaagtctactttgtttcttgccctcatttcatcccaaaagttactgtaatcccttgatcttaattcttgaacattttttaccctgttttatttaattcatttttatactcatctatattcatctctgacttacactagaactctaggcttgcaaatgcatatacctatttgatatttctacatggatgttcaataggcatttcaaacttaacaagaccaaaataaaacatttaatttcccccagaattaccacaagtgaccaaattatatttgagaggaaaatagatggtttataatctatatgattcaaacaaaatagaaatctttattgatgattaacgaaagataaaagaaggaagtagtgctacatgccacattgctgtctgggatgtttcccaccatcagaagcaacttcctgaatagtgttttcaaattgggatatgttgacgttttggtcttggatccccaaagaacacaatctgaatgatttacaagtcactgggaaaagccattgtgttatggacacccaactttcatatttgttattgtgtgtcaacctaaataatagacagagagaggctctctaagaaaatgacatttgtttaggaatggggcattgcaaggaatggggaataggcatgccgtagtaaacgatgtgcgtgttcagagagataaagaaaagtaatgaggattacataattgttttgagataattatgcttggctaccaagaccaataacgagggtgatgccagttcaagattggacagacattgctgggcagatgtccttgcagtactatttttttgtataaggttgcaatagcccttgtgcgcaataatggtttttgcaaagtcatattttatagtttgttgtcaggcatacaagtgtgaggactttctctttatggcttttcctggctctatttatcagaattctctctctcttttttgtttaatttaacacaagtgactccattttgagttgcacaattttcacacatgactaactttcatttctcagtgtagcggaatcccttaaatccagaaattttacatttataaagttttgttcaaaatgatagtcaatttatattttagcttcttaaccagggtctccaagaaacttagaattgtacaagcaagtgagatttaaaaaatcatttttttgaattgtgtatgccatatgttgtttgtgctcaaattgctggacatgacaatttcactggtggcctttcagtcctatatcacagcatgaagaccattttcatttaacttagtctagtctcaacctttgatataagattggggaggacattgataattgttaagagctgaattgcatgggagggagttttatgagataatgtcagcctgtcactcattaattactttgcacaacctaccctatgcacttcagatcaactaatagaagtgggcaatttttttttttttttttttttttgagatagagtctcgctctgtcacctcggctggagtgcagtggtgcgatctcagctcactgcaacctccgcctccctggttcaagcgattctcctgtctcagcctcctgaatagctgggattacaggtgcatgccaccatgcccggctaatttttgtatttttagtagagacggggtttcactatgttggccaggctggtcttgaacttgtgacctcagaagatctgcccaccttggcctcccaaagtgctgggattacaggcatgagccaccactcctggctgaagtggacaaattttaaagtgcaatagaaaataagaaggatattttcattccaataataatttttttcttcatggctgagctgctcccataccactgttgtcaaaaacattgcaaaatatgaataagttagaaattatttatgtcatgaaattttcatataattggcatttttctcatttatgtatttattatgcccttctatcttacattttgttaacttctgtattttatgtgtctggtagtccaaggcaatgatttttaaaaatatgtgagatgagagaggaagattctaggcctaggtgtacacacaatcttaggaataattttgctgcaccagtgcaacaagggaaacaacacaaatccttttgaatgaaagctacttataggtagattttttgttgtctagaaatccagttccattgaattccattcctattccatcatgctctgtttgtgggaaaaaaattgatgaacgtagcaatggcttctgcacaattaaaaaagacacttcacggcaaatcctaatcatctgaaaagtaaaagtgctgattattttaagtcattgggttctcaagagagagtaaagattttgctgaaaatgtcttactcagtaaaaaggctcaggaagcacattatttagtagcagaagcagaatttatttcttagaaaactttatgttggtgagaacccactaatggtagtgtgtacaattatggggagtgaaattctagggaaagttgagacatttcctctctgcagtggtttgatatgtcatcatatcacgtaaggctgaagagattttgtatagcaatctgataaaaacaataagaagttttctatttaggttgttgtgtcaacagatttcaccaataattgtcatattgtagtatttgtaagatttgtaatatgatggtgaaatccaagaaaaatattttgctgggaagagttacttgatattcgtgaagtccaagatagatttaattttctttcgtgtctggaaataaaaggcctgttttggaggttccttgcttacatcagtacaaatggtaggtcatcaatactggctccatgagatatttgtgtcaacccagtaataaccccctgatttcttcagagaagagtttgtataaaaactcttagagataaaagtttttaaaaattttagatgaatgtacaaaattatcaacttcatcaaccatcaaatggttggctttattaatttgtattaattaattttattatcattcaagggtgatttaaaaactctagaaacctgaactcagagcacataaatgtcctcctggtgctgtagcaatttgttatcttagcagaggcagaggtctgaaaagtaagtgtaggagtgctttcaagaaaagcataggccaaattttgctgagtcagttgaagataaaaaaaatggttatagaacataacctactcagctaacacacttttcctcatatgaaacagttgccagggctctgcaaggttctggggaaaatgttttgacctcaagtagcaagaatcttgcacttaaagctgataatagccatcctcatagatgtgaggtaatatgtcattgtgattttaacttgtctttctctgatgattaatgttgctgcgtatctttttgtagaacctattggtcatttgtatgtcatctttggaaaaatgtttactacagtgtttagcccaggttttcatcacgttgttagatttttgtgattgaggtgtagaagtacttaagtcaaagaagtcagagtcacagaagtatgaatgctgcaagatttcgcttatatatgaggtatctaaaatagtcacactcacaaaatcagggagtagcattgtgatttccaggaggttgggggcagggagaaatagggagttgtttttcaaaaggtatgaagtttcatttgtgctacgttagtaagttctagagatctgctgtgtaacactctccctatagttaacagtattgtattgtatacttaaaattttgttgagtgtttaaaaaaggaaacttgtgaaaatcatgttgcaaatgaaagtctttagatgtttccttggctgcttgggtttgagaaagaggaaggcaagtattgagagaaggcatgtgttatgtgtaaggtgtcattgaaaccctctggaagaactacataacattgaatacccctgtccctccttctcaacacaagcttatggcaagggaggatcctttctctgcttctcccactcagccttggaacttgactttaagagaaggatggtaatctgatcatacagtcagtatgagatatactgatctgactccagacaagttctggatttttatgaagggtatccagacattcacaggacagtaatgaacttttttttgctgcagtttccaacttgttagatgcatgagcaagagttttcttcttttataagcatcatgaacaaggaagaaaatcacttcatttctgttgaaaaagaaatgtgtatgcatctcaagtttggtttcaaatgagtatttttgcagcaaaataaacataagtttcgcatgaaaggcaaaagtcctatctttagtttaaaacacaatacttgttacggttatatagcttaattcaaaaagtcacaacatcaacacatttacataggtttactagtgctatattttaacttggacatatcattttgaaaatgtatttccaaagtcttgtataaaaagagacattaggctatatttttgtttgtattgctttggctaaaggttttagtagctttattattcaacatggtcaataaaattttatttatgtaaataaaattatttaaaacccattttatatctttattaaaattaaatctactcacttcatctttagaacaaagtaatcccattttggctcaagctagttgttatgttgtcctcatgagcctttaaaatttatgaaaagaaaagaaagagattaatttcaagaatcataaaataagctctactacttttttaaaaagagtaggcattaactttaaagctatttaagttggaagaaaaattacttttataccacatagcattgctctttagcatcttgtatagtagcaaattgtggtgagacatttaggtctacgtagatacactaaaaatatagtcaaatgtgaactaaataaaggaaaatatgaagttttctttggctaaatactgactagcattagaattaatagtatctgtgagaagggataaccacagaaaaacagaaggacaagttggctaaagtcaataaatgaaattattattgaattattatactcattatgtaattatacaagatattgaaatgactatatttatgtaggggttccctgagatccacaatgttttttaagggttcttccagtgtacaaatttgagaaaggctgatctaggcatatcaggattattttactcaaagcatttcgtagaaatcactacacagcaaccttaacaaatcctttggctaggtgcggtggctcacacctgtaatcccagcattttgggaggctgaggcgggcggatcacgaggtcaggagtttgagaccatcctgcccaacatggtgaaacccagtctctactaaaaaaatacaaaaattagccacacatggtggcccatgcctgtaatcccagctacttgagaggctgaggcaggagatttgtttgaacccaggaggcagaggttgcagtgagctgagattatgccactgcactccagcctgggcaacagagcaagactctgtctcagaaaaaaaaaaaaataaaataaataaataaataaataaataaataaataaaaaataaacttaaaaaaaagtcctttgtttatcctccagctagtaaactcatcattcaagatttacaatggttccaaactttctcagttttctgagaagggaattcagtattcagacctaccgatagtgattttctttctcgccctagaaacctgcccccccttggtaaatgacaccattatccatcgtcattcaattttcagtttgaaatgtctcctttcctcactctctcctgccatttagtagagcaagtccaatccaatctacctttgtagcatatcctgaatcctcacacacctctttccattgccactgctacccccctgtgaaaaacacaacgatcttttgccctgattatcaaaatagctacctaactagcctccctccgttcactgtttccttctgcctgtccaatcttctctgtaaagaaactgtgaaaaattatcaaaatctcaaatcatcatatcctttcagtttccccatccttctccccaaattgagattcttcaatggtttccaatcgtgtttaaaataaaatagatttcctatccccaaggcctgtaatcagccccctgcccacatctgtggcttcatcctgtttgattcccctgactctaggtctccatgcttcagcccccttgccctttctgttctctgaaggagccaagctcatccccagctttctcctttgcactagctggttcattttcctcgagatgtctcgctcctgattttctcacggctatttattttatttacgtaaataaaacttcttgtgtttcaagtcatctcttaaagtcatttatcagagagcccttccctgagcctcaatttaaattagtcactgagttactcttaaaaaaaaaaaaaaaactaatgcgtatttgacaaataaaaattgtatgcatgtatttacagtgtataaggtgacattttcacataggtatacattgaaatagttaaatcaagctaattgacatatctatcaccttacatacttatcatttttcgttgtgggaaatttaagatctattccttaggaattttcgagtattcaatacattattttttctctctttttttaaaatgacaaaaaattgcacttatttgttgtgtacagcatgttgttttgaagtatgtatatattgtggaatgactacactgagcttaagttaacatatgcattacttcacatgcttatcattttctgtggggagaaaacctaaaatctactcattttgcaattttcaagaatacaatacattgttattaatacaatacattatttatttatttatttatttatttatttatttatttatttttgacatggagtctctctctgtcgcccaggctggagtgcagtggtgtgatctccactcactgcaggctctgcctcccaggttcacaccattctcctgcctcagcctcctgagtagctgggactacaggtgcctgccaccacacctggctaattttttgtatttttagtagagatggggattcaatgtgttagccaggatggtctcgatctcctgacctcgtgatctgcctgcctcggcctcccaaagtgctgggattacaggcgtgagccaccgcacccagcccaatgcattattattaactatagtcaccatgctatatagtagatctcctgaactcatttctcctttctaactgaaactttgtaccctttgaacaacatctcctcatttcctcaccatcacccgcagtcctcagcaaccgccattctactccctgcttctatgagttcagctttttctgatttcacatgtaattgggatcatgtggtatttgtctttctgtgcctggcttattccacttagcataatgtcctccacgtttatccatgtttcatatgacagaatttctgtattatatctgtttcaattatctgcagggcacttggcatttttgcaggtttctgatttatgtataatttatttacttgttttgggtttcttcccaatagaaagcaaacttaatgaaagcagggaggttatatattacctgtattgttcaccactgtatccccagccagtaatactacctggcacagaaaagtatttaaataataaataaatcagtctttttttatggccacactaatgaaaatacagattgttagtgactggcatattatctcccttccaagtgggttatgaggagaaggtcagaggcatgtgacaacccttctgaccatggtgaacatcatgtgacatacacaagttatatggatatcctcatcaccttagtttcctcgtgtgtaatataagagtgttggatcagaattatgtccaaggtgctttccagctctacatatgtacatttcataaataaatgtgaactgtaccttaagattccagtagctgtaattactaagtatctgtatcaatctctattttgaactgtaacagcaagaatatcatgcatatcaacacagagatccttcatgtgcctgagatattctaataagctcttataacatggtatgttatacactatatctcaaacaactcttactattgctataaaattttcaacatggaactttgattaagataaagtgaagagataataatgtttctaaatcttaggaaattttttcctgttactgaggtgggggacttttcaaaaatgtatttctgtcttttgctggaaatatttatttcagtttcctacagcattgctatagcattgctgtaggaaattaacagtaattggtgactggcagttcaactgacagaaacacattattttgcggggaggcggaggaaaagcattcgcaaactcaatatgaatccatttcggaaagtagagttgtttagagaaatacaaatatcttcactcagtttttgcccacttactgaaaacacagtgtgaaactaaaattgaaaaagcaatgttcttctgaacatctttccattaaatattgcatcatataaaaataggattttatggttattattacacatattttcttccctttcatatgcagaatctaaaaaagtcaaagttaatagaagcagagactagaatggtggttgctgggggtgggagcaatggggtgatgttagtgaaaggttacaaagtttcagttatgccaatgaattgttctggagacctaatgtacagcatagtgattgcagttaataataatgtatacttgacatttgctaagaaaatagatcctatatgttctcacgacacacacccgtgcgtacacacaagcacacacacaaatagtaacaatgtgaggtaattaatatgttaggtagcttgatcatagtaataatttcacaatgtatatgtacatcaaaatattacatttgacccatgaattatgtatagttttatttgtcaattgcacctcaataaaggtgaaaatataaatgtgtgcttttataaatataactaatatactgaagtaaatataaatttaagtatatactttaataaaatttgagaatgatgtgttaaatagctgtaatatgaaggataatgtatgaaaccattattctcaatttaacatagtgccaattagcttaaaaaatttatcgtggctgagcgcagtggctcatgcctctaatcccagctctttgggaggccaaggtggacaaatcacttgaggtcaggagttcgagaccaacctggccaacatggtgaaaccctgtctctaccaaaaaatacaaaagattagccgggcgtggtggtggtgcatgcctgtaatcccaactaatctggaggctgcagtgggagaattgcttgaacccgggatgcggaggttgcggtgagccaggattgcaccactgcactcaacctgggtgatagagctagactccatctcaaaaaaccaaacaaaacaaaaatttattgtaactcttcaagaaactgtgaagagatgaaacagacagatgaggtttgaagagtaaaaccgagggagaaaatagccaacttgatagcacactgggtgccattttgaattccaaaactggggtcccaagaaagcccaggaaatgatatacaggcaaaagtcacctgggcaaaggaccatcaaatgggaggaagaagaagaaactgtaaaagccaaaaggaaagctttgtcaaccttacgattactcacatgagcatataatttgcaaatgcaaccaaataaatatttcacgatagtttaaacttacctaagcatttcaagtcatcattaaagagagagacatacagttgagttggccatcacaaagcatttagttaatgaaaagccattgttattagtagctttattatttatttgaaaatagcaagctgaaaattatctacaggtcagcaaatagcacagacaattgaaagcacatagattcctttagcatctacagttttacctaattagatttttcaattagatgctatacagtgcattatacaaagaacttccatattccctaggtagatacaatagtttatggatgccttacattctgttaatcttgataaaatgggaaatcaacagcaagattatactctttgttcccaaagatcatgtaaatattttcaaccatattaaaacagactgtatttccatcaactatttgtactttttcctcctttgtgtctcaaatggtaacatataatttataaagttttattgtaaaacagtgattttttaactaaaaatagaaggcagcattatagttattcaaaataaagaataatataacatcctatgataccataataaatttaacccatatgattcgacattgttatttgggataatttgtctctatacaaaacaaaatataatctccaaactcccaaagagcagaatttctcaatgttttgcaacttttagatttctggtggtgttttgtggtagaatagtagaagggtaaaagacattcctgagatagaattaatttttctctgtgactccaggatgtgcccattatattaatatgtcatatttttactacataaacatggaaaacttcgaataaaggaagtaattacatcattaaaaggaaaagttacattctgtggctctggacagccatgttgtatgaccacccaaagtaagagagtggaaatcaaaaattaagcatatattagaatttcgatattgtcatttaacacaaacaattgttcttaaatatacaatattataaaattactaggaaacagcattttggtttaaaagtaaacttttcagtccctgtctactaccattttaaatatattgaaagagatactacaggccaaggaattaaaataagttgattaagtaatttcctgctggatagaaaacttaaaatgctaataagtttacattcagagatttagttctcaaataacagatttgatttatttgtcagcttttagatatcatagtaacagaactccagaaaatatgcaaaagaggaaaataaagtgactgctcataaaccaggcagcatggtctcaggaggataatccacagtaacttttaagggcggtatcgtttcaatcaaacttgatttaggataaaagaaacaaaacttattactttttaatagacttattttttagaacagttttagatttatggaaaattgagcagatagcacagagagagtttccttcccatatactccctctgcccagacagtttcctctattattaacatcttgattaatgtgataattttttacaattgacatatcaatactgatacattactatgaactaaaatccatagctgatgtcaggattcactctgtattgtgtagtgtgtagtttttgatgaatgtatagtgtcatatatatcatatatccaccattacctaaaaaatcccctttgttccacctatttatccatcctctcctatcctaaatctctgccaatcactgaactttttcctataactatggttttgtctattacataatgtcatatagttggaatcctacaatatatagtcttttcaggctggcttctttatccgtttaagtttctcctacatctcttcatggcttaagagcttgtttctttttattactgaataatattccatcctatggatataccagtttgtttgtccattcactgtttgaaagacatcttggttgtttccagattggggcagtcatgaacaaagccgctgtaatcaatcattcatacacagatttctatgcagatgtaaaccttcaactcatttaggtaagtatacaggaaggagatctcttgatcttctggaaagactatgtttagctttgtaagaaactttcaaactcttgaaaagtggctgtaccatttttcatccccatcagcaatgaatgatagttctatttgttctgcattcttgcagcatttgatattgtaattttttttttatttcagccattagagatttgggcttagtgttgatttgggtatttttaaaaatctgttttaatttgcatagttataatatcatgaaggcagtgaaatctattgactcaaatacaaaaagtaaaaattgtagacatagttatatctaaagaattatactgacaaaatgtataaaatttgcaatataaattcaataatctattaaattgagctttcaagtaagttgtttacctcaagataataaccttaaagctgaatatttccaccagtttttttgtttctttcacaaggaaagtacttttatctgtggaagtctttctctttttatcccgttagaaatataatttatttcagaggaagttatgtgaacatgagaagtaattataaacaaagataactggttttcctcttaatatctcctatctcatttctcacagattgcatacatttgatacatttcacaaaaccttaacaattcttagaatggaaaaaaagattgaagcagctcaattttttattccaattacttaattggaaccggtagtgagttgaattgtgcattcaagtcctaacccctggaaactatgaatgtgatcttcgttggaaatagtgtctttgaaatttaattagttaagcatcttgagatggccttaaatccgatgacttgtatacttataagaggaggacaggacaatcaaaaagagagagaaggtcgtgtgaagacagagggagagattggagtgatgcagatacaagttagggaactggaaggattgctgggagtcaccaaaagctaggaagaaacaggaaggaattattccccagaaccgtcagaaggaacagagccctgccaactccttgattgcagacttctggccttcagaatcgtgaataaataaatttctgttgtcttaagccacccagtttgtggcaatatgttatgcagtcgtactaaaaaaaataggtaatatttaatatctgaataatatctggttaacatcttattctcaggaacacaaagatatgaaccaggctatcggattaatgaagctgagtttattccttaactataaatgttacttattttttgttattggcaattattttttatttcactactgtaagcatgttattgcctaaaaattttagggcttagattttataaatggggaattgttaaaatgttcatataaatttttattttaataaactcttatatggtacaaaatcatttacttgcttcagaataggtaatcaaaatgtagcctcattatatttaaactcagttcccatagggtactttgcttattaatttggtgttaatttaataacaaaaaaaaaagacttctagtttgaaggccagaagataagtgaatttccttggctagggaaaagtacaaccaaacatttcatagagacttattttgaaggtttttttctttccttggtatattaaactaggacaggaaacatttctaataaaacagtgaacaactgacataatgaattgtttgacttaatctgtaatctaaaagtagacttctttaaatgcagaaaatattttggattttagaggttgtgtcctgaaagaatttgagttacgtgttgtgacttatagaccagcaaaagacagaagcacatttgaataaagttcatatttttaaaaacttttttttttttttttttttttgagagggagtctcactctgtcgcccaggctggagtgcagtggcgcgatctcggctcactggaagctccgcctcccgggttcccgccattctcctgcctcagcctcctgagtagttgggactacaggcgaccgccaccacactcgactaattttttgtattttttagtagagacggggcttcaccatgttagccaggatgatctcaatctcctgacctcgtgatctgcctgcctcggtctcccaaagtgctgggattacaggcatcagccacggcgcccggcctacagacattttttattaaagtccacaaggttaccatgtaagcttctttcaattgttataaaaagaaaattgtattcaaataatttctgagaaaatgaaatggatagtttctgaaattaatcatttaatacattttaagttagaatgttttattgataatgtggatgaaaaaaggagagcatatattatggactgaatgcatgtgttccccaaaattgacttctagtgtgctgtatttggagtaaggaaatcactaacattaaataagttcacagggtagaaccctaactcaatagaattagtttccttatgaaaagaggcaccaggaagctctcaccccttctccacccttggcacatgcatcaaggaaaggtcatgcctttcttcatacatacgtcttcagacatagaaagaaggtggctgtctacaagcaaggaagagagccctcaccaaaaatcaaattagtctgcccttttgtcgtgggctcctagcctctagaactgtgagaaaataaatttctgttgtttaagccatccagtctgtggtgtcttgttacagcagcccaaacagactaaaacagcatgtaaccacaaaattagtccttaactgatcatgtttcttagtgattttatataaatttcacttttaaccaaatgaactgaagacaatggaaaaaccatttggtttttaatacagtgacatcaaattttcatattggtgcatctttgaccttaaaagtgtaatattctgcacagtttaacatagacagtaaatatgctggctacgtctacatctaccaaagccagcttatcgttcaatgtcagttcttagcgtgaataatttaaaaggaagatccatctcgaaaaatctttgttagagaatgctgtctgatatacataaaaaatagtagtttagatggtaaagaatgatccaattattaaatgaaactctgtttaaaattcagtgtttttttgtatttgcaaaccaaactaattttaaaattgtcaaaattattcacttacattatttagtgtttctgggtttacaagaactttgttttgcttaaatctgagacgattctggctcagataaagttttcatgataagggaaatagctaagagacaagcaaagatctgtaggaaccatttgagtattcactagcttttgacatatgaggaagatgtcagcttagagggctaatatataacttttaaaatcaagttttgaaagaatttctgcagtattcataagtgattaataaaaagcttacatgtaaaaatgtgtgcataaataggcatgcagttcgttctaaaacttcaaacactgtttcttctaagttgcatttaaatctccatcaaaacattattaatttataattttaagttttgtttctagctacacattccattttcttgttacaattgaaagtataaagaagctttcagttatattaatttgggtctgtaattatacttacaacactgtctgtcattcccaagtttttcaccacaagagtatttttttactactttctctcatttacctcacacttggtaagattttgttcaccgaatatatagtatttagaaaataaagcctaactaatttgacattaatcaaaggaacatattaatgtgcttctgatcaacataagatattcagtctggccactgggctgatataatttcagttaaaagaaaagcagtctggtgttttagataacctgggaagtttgaaccaaagcaaaggtaagcaaatacatggctgtgattgatcattatgaaatattaatctgtggactccattcttatcttaagtgattccctcaaggaaaaatgccaccttgaaaacaactgatacaaatcttcaaattctatttctgttctttatatgctaaaataacctaacatagtgtcttttattacctaacatctcatttttactcaaaagctgttataacatttggtatcttggaaatgaagtaaaacacatttctattaaaagtaacaaattaattaaagtctattgttatacatttttaatactgcttaacgtgatagctaagagaacatattttgaaatgaaagaactcatagcaatactttgagcaaggcataattatttagcgagtctgtgactaaaaaaaccttaaatacatcagcttattgaaaatatcttttaaaaaccctgcatcttcttttttgtgttttattgacaaattaatttttaaaactttaggataatatctcgaagcatctctgcagcttaccaattaagatgttgtatattttaagaaactagtataactattgaaatggaacagaaacccttaccggcaactatttaagatgccatgatggatgcttatctctaggtcataccataggtcataccatagacctataaccttgttttcaaatgagtactgcagttatccgggaaataggtaaataaatgtcagtaatgatactaatacttccacaaatggattgcaactacattaaatgtcagattctgtcattctatgatacttggcatatttttgatatgaaacatagctcatgttacccactgtagtttcttacttccatctgagtttctgtatctggaaaatcacttaacacccctgagtataaccctggagtgaatttcaaatgatgaaacactagagtttggcctacttaatgtaataacatagatattcaatttttcaaaatatataccatattaaatatttttcttcttcattcatttatgggtacaaacaaaggaacccctgaaaactatttttctgggatcataacgagcctgtaatttttagaaagaaaactctagtgtcacgtatattttataccttcacaaaagaatcctggctataagtccattgagaaaaccacattgcttaattctagtgagactgaaactttgtagaaagggtgtagtttacctaacaggtgccactaggatgccctttctttctcttgtgtgattgctctagctaggacttccagtactatgttgaataatagcaatgaaagtgggcctccttgtggtgttccagatattggggaaaaggctttcagcttttccccattcagtatgatactagctgtggatctgttgtacatggtttgtattatgatgaggtatgttctttctatacccagtttttcagtttttatcatgaagggatgttgaattttatcaaatgctttttcagcatgaattgaaatgatcatatggttttttgaccttcattctgttgatatgatgtatgacattgactgatttgtatatgttgaaccatccttgtatccctgggataattctcactagatcgtgataatgatttatttatttctgcctgatctttattatttcttttcttctactaagtttgcatttggcttgctcttcttttcctaattctttaagatgcattgttaggttgtttatttgaagtttttctagtcttttgatgtagatgcttatagcaaaaactttcctctaagtactgattttactatatcccatcatttttggtccattgtttccttcatcatttgttttaagaatttttaaaatttctctcttaatttcttcattgacctactaatcattaaggagtatactttttttttttttttttgagatagagtctcactctgttgcccaggctggagtgcagtggtgcgatctcagctcactgcaacctcagcctcccacgttcaagtgattcttctgcctcaacgtcccatgtagcttggattacaggaatgtgccaccatgcctggctaatttaggagcatacttttaatttccatgtatttgtatagttttcaaaattcctcttgttactgatttttagttttattccactctggtcagataagatacttgatataatttcaatttttaaaagtttaacactagttttgtggcctaacatgtagtctatccttgataataatacatgcgctgaagagaaaaatgtgtaacctggaatcactggataaaatgttccgtaaatatctgattggtctattttggtctgtagtgcagattaagtccaatgtttctttgttgactttctgtctggatgacttgttcaatgctaaaagtagggtgttgaaatctctaactattattgtattgaagttgatctctctcattagctttaataatatttgctttgtatatcagaatactgcagtagtaggtacatatatatttacaattcttgtgtcctcttgctgaattgacccctttatcattttatagtaacctttcttgtctctttttatagtttttatcttgaaatctattttgtctgatttaagtatatctacttctgctcttttttggtttccacttgtgtgaaatacctttttccatttctttatttttagtctctgtgtgtcttcataggtgttgtgtgtttcttttagggaacagattgttggctcttgtgtttttttctttgtatttttttttaattcagtcactctctgtgttttgcttgaggaatctagtccatttacattcattgttattattgataagtgagaacttactcctgccattttgttgtttgttttctggttgttttgtggtctcctcttccttctttacttctttttagtaaaggtgtttttctctggtggtgttctactttcttacttttaattttttgtctatacattgtatgttttttgatttgaggttgtcataaggcttgcaaataatatcttataacccattattattattattattattattattattattttattatactttgagttctagggtacatgtgcacaaggtgcaggtttgttacataggtatacatgtgccatgttggtttgctgcacccatcaactcgtcatttacattaggtatttctcctaacactatccctcctccagcccccaacccctgacaggccctggtgtgtgatgttccccgccctgtgtccaagtgttctcattgttcaattcccacctatgtgtgagaacatgccgtgtttggttttctgtccttgtgatactttgctgagaatgatggtttccagcttcatctatgtccctgcaaaggacatgaactcatccttttttatggctgcatagtatttcatggtgtatgtgtgccacattttcttaatccagtctatcatataacccattattttaaattgatgacaacactgattgcataaacaaagataaaacgaataaaaactcaacattttaattttatctacccactttttaaccttttgctgtttgtgtcttattatactgtgtttcaaaaagtggtcatacttcttatttttgattggttcaacttttagtgtttctacttaagatatgattagtttacatataacaattacagtgctataatattctgtgttttcctgtgtacttactggtgagtttgataccttcagataattttttattgctcattaatgtcattttctcttggactgaagaactcccttcagtattgtaggacaggtctggtggtggtgatgaaatctctcagctttttttttttttttttttttgcggggaaagtctttatttatctttcatgtttaaaggatattaccatgggatatagtattataggataaaatttttttcctctaatactttaaatatctcatgccactctctcctggcctgtaaggaaaagtctactgccagatgtattgcagatatattttattttatttgtttcttttatcttgctgcttttaggattctttcttgatctttaacttttagaagtttgactattaaaactttgtttattgagggagtcttcttcgggttatatctgcttagtgttctataaccttcttgtacttgaacattatctttctctaggtttgggaagttctgtgttattatccttttgaataaactttctatccctatctgtttctctatctcctctttaaggtgtataacttgaattagattaagatttactgttttgagtttatttctagattttgcaggtgtgtttcattctttttaattcttcttcttcttttttttttttggtctgctctgactgtgcaatttcaaatagcctgtcttcaagcttaccaattctttcttctgcttgatcaattctattaagactctgaaacattcttcagtatgtcaattgtatttttcgactccagaatttaggcttgaatctttttgattattttaatctctttgttaaagtaatgtgataggattctgaattccttctctgtgttatctttaatttcattgagtttccttaaaaacagctactttgaattctgtatctgaaagatcacatatctctgtcttttcagaattggtcccttatgtcttatttagtttgtttggtgaggtcatgttttcatggatgatcttgatgcttgtgaatgtttgtcggtgtctttctgggcattgaatagctaagcatttattgcagtcttcatactctgggcttgtgtgtatccattcatcttgtgaaggctttccaggcattcaaagggacttgggtattataatctatctttttggtcactgcagccatatctgcattaggagacaccccaagcccagtaatgacatggctcttgcagactcagaggtacaaatttggttgtctttggtaagatacagaagaattctctgagactcttgttctcttcccttactttctcccaaacagagtcattctctctctttctctctctctgtcccccccacccccgcccctctgtgctgagctgcctggagctgtgaaggggttacactagcagctctgtggcctccaccaccggaactgtgctggatcatacctgaagccagtacagtactggctgtcacctgaggcccatggtaaccattgcctgtctactgcctatgtttgctcaaggccctagggctctacaatcagcaggtgtcaaagtcagccaggcttgtattcttttcttcaggatggcaagatctccctggccctgggcagatccagagatgctgtccaggagccagggccaagagttggaaaccttagaaatctctgtggtgctctattctactgtggctcagctggcactcaagccacaagacaaaaagttcttcctgctcattcttcccttttctacaaggaggggagtctcttctcgtggccactactgacccaggcccacagtgagtacttcctggctacagctgatgttcactcaaggttcaagggctcttcagccagcttatggtaaattttaccaggcttctgactctctctttgggacagtgggctcccctctggcctaggagaggtccagaaatgctatcccagagccaaggcctagaactggcaacctcaagaggctactttgtgctttaccccacgtggctgagcttgtacctaagttgtaagacaaagtttcctttactctttccactccttttctcaagctgaaggacactctccacataaccatgacagctgggactgtgctgggtcacatctgaagccagcacagctctgagtctcactcaaggctgacaagtacaacctgggtattgctgctcattattcagggaccaggggctctttagtcagcagatgaggaatctttccaggactgggttcttcccttcaaggcagtaggttcccttctggcccagtgtgtgtctagaaatgttgtccaggagctaggacctggaatgggaggacttaggactctgcctggtgccctattctactgtggctgagatagtatccaagttccaagtcctctttattcttctctctccttttctcaagtggaagatagaattttctcctggagctgcaagctgcaagctgaactgccttgggttggggtataagtggtgcaaggactcctaagtccactggctctgagccccgcacaacaccaggacttgccaggaattacagtccttgtgaactatactgcctttcaagtttatttagcatcccagagtacttcatcccaggatggtgaagcttgccagaactcaggttctgattgctggaatgggtcattctcctctggctagggctggtctaaacactccctttgtggtctctagctgagttatcctccatgttgctttctgctgtgacagagcagcactgagttccagtgcaatgtcccacaatcacggcacttcccctccccgatgtgcacagattctctctctgtgcgacatggccactgcctgggggatgggatgcaggtggtgttggcaatttaagactctttcctactctcttcagtgactccttcagcgatatgaggtcaaaaccaggtatgtgattgctcacctagcttggttcttatgaaggtgcttttttgtgtgtatagttgttcagtgtgatgttcttgtggggaggacaactggtgaagtcttgtattcaattatcttgctctgcctgctcaggttaaaaactctgactcctcttttcgcatctccagtagacccatccagtccaatccatttattgtacataaaaacatctagaaatttattcctccttatcacttccatagctactaccttggttaggctgctatcatttcttacatggtctactgcaaagtctcctaatcatgaactactaaacagaagcaaaagcaacttttgctcttgacccctcacagtcttatttcaacacagtagccagaatgtcagagtaactctatcaaaactcacattacttctccaaagttgttccatcacattcagaataaaagttaaagtcattaaaatggccttcaaagtttacactgtttggcacttgttacctctctgaaccacctcctactatcatccctgattgaattttgttccagctacacattacttttgacttgcctcaaaataaccaggcatgcctctgcctcaaagactcccacccaagcctcaccactcctgttcatacacctgcctcttttcctttaaatatttatatattttattcccttgcatcctacacatggatacacacacacacacacacacacacacactcacactcacaccctggccgcattcctgctgtattttgttccatagcacttgtcattcagtagcataaaatgtgttttaattacatagtctcttcatttactgtatattccccctctctggttttgagctctagaaggcagggattttctgttttgttcagatctgtacctgtatttaggacactgaacagcatataggtgatactcaataactattgaatgaatgagttacttaagctagaggaaagcatgtcaaattaaaaacaatcaatggcccagcaatgagtccaaaaggaaaaagttagcatcagaatctcaacaggtcaggaagaggtttggtggtcttgggacattgtgagttagactaggacattctggaaattctatgcctgagacccacaggtttcaagatggattgataagtcactgcttttcagttgccaaccatattggccattactatctttcacatttactttactttttttcccccacttctggggcttactaattaatcatgatggcaaaagtcatcaattttgaagaattcatatatcaagtgtgcaatagtcacatatggttagtggttcctgtattagacagaaccgacctggaacttttcaatcattgcacaaagttttattgatcgtgcctctctaggcttgtttttgctagttgcatttttttatttgtttgtccaccataaatttattcatttgaaaacagttattccatgatgaatatatgagagtctatctattaagagtggtagtgaaatttaaagaacttagaatccatgcagaaaaataaatcataattgttacacaataaatgttccattagaagcatatgcagagtactaaatggacaaaaataaagcagtaattaattttgctttggggatgggaatggtcatttaatacatgctttgagtctttctttttgctatggttataactgtcagaaagaaatagctgaacactgatgtctaatatgtttattgttgaaaaaaatccaatcgatatcagtctgaatgttaacgaatagcatgacttttccactgcccaaacaatatcatagttaatagcaattttgatgtctgaagccaccataattgctctcagaaatcaatagatcaataagagactctttttggttttagatacaagtattgaaccacacatcatagtttgaaaaggttacttttgatcatgacaacccagacaaatttagaattagtttgaaaaacaaatagaaacaagtgaattcttatttttaaagcctatacctttagacttaaagcagtacaaacatgcatttacaattttattatatattatttaaatttcatgaggctttgggtgttttcattggatgtacaaatttattaaactacaataattaataaagccacagctaaacaattttctaaacacactcagaatttatctacattatagtttaaaaagtaaattataaaaaattaactgggacaatatttaatacctgaaatttaatcaggaaaagttttatagaaagctttctgtaaatattcacttgaattgagaatttctaaattcatctctttctttgattctttcttcatctatataaaaattgtgtgttgatattcttctatgacaatgtcatgtttgaaacatttctctccaagggaaataatcccgcaatgagatgtgtaaataccatgcttatcttagctggaactacaaacaaagatgaaagcaaaaagcctatgtccatcatgttatttggaggaagtgatggcattatcatttaaagagcaattgcttgtattgattgcattcagcatttaggaaacactaatagagatggagatgtgatggtttgtttgttttcgaagaagttaggtaatgtcaaacaaatgatctgggtccaaatctgacatatgaacaattcttctttcagcatatgttactggaattgcaagtaatgatttgatcgaagatacatcttttgagacactcttataatttagtcagctttactggtttagattgttatttggacattttcaacctttaataactgtaaggcttgtaccagtacagattacttattgcttataaaatgattattagcaagttaaaatgcctacattttctaaggaggtagaaagaaatctttcctgacctagaatccaaacaaaatgtcccaaaggtactgaacattttctcttatttagtatacaccaactaaacaaccgaatgctattattgcccagttctgttttgcctgtgttgggacacaaaaaacacttttcagttattgcaactaacattgtttgagtacagtagcatgcttctagtcattcactgggaatgaaattggggtggatgaaattaatggaaagatagaagaaaagaaaatactctgaggtagacttgggtgtaaaggatgcccagctgagattggagtataaacttgaacaaggatggagaaaataagactagatactaagaacttggggtcatctgattgaattatggctgggtatcttcaaagccacctagcatagtcaatggagatttcaattaggactgtatacaagtataggggtttttatctataaaattgaggcagcaggaaaaagagctgagaccagcaaataggaaatgagtcaagtcaaaatgagtttatttatcaaatgttagagttcaggcagtcactatccccaccagttttttccagtgatctggattgacaagtgggaaggagggaaagacccttaataactttttcatcttaataactatttcttctatactgggaaggtgcaagccagaaattctaaaatatgtggggaacaatgccaagtcttttctcaagaagttcaatgagtctaaagtcactttttttctatccgtagactctaataaatttgcaatgccaactttgtcatccacctatttcttccctgtatccaatttccttattactggtttaaattttgacttgtattattacattagcctgatattctcccctcttgaccttcataagtcttatttatccattaagaaatgttgaaagtcacctcagttctaaagctttatcatgtctgttcattatattggatcacaccttcctctgacctttctcgttactttaagtagtaattattttataatatggttcagtttgttccatatttttcctactagactgcatgcttagaatggataagactagtgttttaattatctttcaatcgctctagcacctagcgaaattcttcccatacagtacacgccaataaatgtctattcaatcagattataacctatctacacatattataagcctggttcaatcacttattgtcttcagagagattttttgcctgtcttgccattagctcttcatttgcaaattgaggaagcaatctactttcactgaatatgtaaaataattttagacttaaggaatgcatatatggaagaaccaggaacagcagttatagactcatcacgtacgtctcgaacatctaaaatttgacaagcactcttctaggtactgttaattactagaagagtcttatcagggccaacttagtacagagaacatttgaactgagccagaatcacttaggcgatagtcaccttatgtccctaacttacagcgtagaccaatctcacacacagctgcattgtttgaaagattctttaaaaaatagtatagaaataataagagtgtaaaattaacaacatacatacatacagttagaggaaaacatagcatccaaaaggataaaaatggtaaaccaaaatgatatttaacaagaaaatataagcaaagatattcatgataaaacaactgtaataaatctaagaaaaattaaataaataattttcacaaagaaggtactttgttctgtgactgtccatgattggcagccgtcttgcctcataattgtctcccagtttgaactcactttaggtaatccataaaaggaagagagaactcaggcttatttgctttctcaaacatgaaaaaaaaaaaaaggttttatcagaatctcctgctttgggaactcctcttctttcattctatgataatcttgtgcagtccaggtagggctagtcctcctacctacaaacttccacctcaggagataggcaattgatcttctccagcatgaaagcaggagcaatcaggtttgcaggaatttattttatgtggaaggaatacgtctaataataagatcaaacatagcagagagatatataaagaggcatggtcttgacgatatcttttgaatcccttcattcagccttcttcaaatttagttcaattccttgactcccaggtatgttgggctactgtattgtctttggccttaagttagtttgagttgaaatatatacttacatctgaacagcaatccagattaatgctttttctttcagtcttatatttagcatatttagcttgtccttaagtcatcgatgattcagggaccaagttaattcttgaatttgccatttgatttgggtttcctcctaatggttattctgaaggatttggttggttctggaatttggagccctaactattatgaaacactggttaatcctgaagaggcatacatctggagaactcgctacttctatctatgagtttactctcaaacttcttgggaaatcttaactaaattggtctctctgcatggggaggatacagtgacatttttatctgggtgaaattaccattaaactccatttaagcaattaacaaagaggtttttaatattgtttagctttggagtcaaataatttttttcctttggtattatttatctttttcctttttttgcaatgctaagatatgcaaaatatacatttacattatttcttctcttatatgttaatttcttactttatgttcccttttcttatttccttcctttctttcttgtttttttatggtttgttggattgattgatacataacaattgtacatatttatggggtacgtgtaatattttgatatatgcatatgaagtataatgattaaatcagggtgattggaatatccattacttcaaatatttatcatttctttgtgatgagaacataccaaatcttttcttctagctattttaaaatagacgataaatttttgataactatagtcctcgcattatgctataaaccactacaacacatttcttctatctaactgtgtttttgtacccattaacaagcctctcttcatttattcttccccattacacttcccactcataggtaacaacaattctactctctacttctaggagattcatttttttagcttccaaatgtgagtgagaacatgctgtatttgtgtttttgtgcctggcttgtttcattcacataatgtcctccaagctcattcatgttgttgcaaatgacaagcgtattagtcagttttcgcactgctataaaaaatacctgagactgggtaatttataaaggaaagaggtttaattgactcacagttccacatggctggggaggaatcaggaaacttacaattatggtggaaggcaaaaaggaagcaagcaccttcttcatgaggtggcaggtgagagaaaaagagaagcggggaagtcccagacacttatcacacaaccagatctcgtgagaactcccttaatatcataagaacagcatgggggaaaccgcccccatgatcccatcacctcccaacaggttcctcccatgacacgtggagattacaattcaagatgagatttgggtggggacacagatccaaaccatatcagcaggatttcatccttttttattgctgaaaaatattacaatatataccacattttctttattcgttagtctgtttatagacaagtaatttagttccatatcttggcttttgttaacagtgctggcataaatgtggaagtgcatatatctttttgatatactgattttctttcttttgcatatatactcagcaatgggggtgctggatcacatggtagttttatttttagttttctaaggaatctttgtgttagtccattctcatgctgctataaagaactggctgagactgagtaattcatatgggaaagaggtttaattggcttacagttttgcagggctggggaggcctcaggaaacttacaatcatgtcagaaggggaaccaaacagatccttacccacatgatggcaggaaggagaagtgccaagcaaaagggggaaaagccccttacaaaaccatcagatctcaggagaactcacttattatgagaacagcagcatgagggtaactgcccccccgactcaataacctcccattgcgtccttcccagcagaggtggggattataggaactacgattcaagatgagatttgggtggggacacagccaaaccatatcatgtcaccctggcccctctcaaatatcatatccttacatttcaaaaccaattatgccttcccaacagtcccccaaagtcttaacttattccagcattaacccaaaagtccaagtccaaagtctcatctgagacaagtcaagtccctttcacctatgagcctgcaagttagttacttcctagatacaatggggtacaggcattgggtaaatacacccatttaaaatggggaaatattggccaaaacaaaggggctacagaccccatataagtacaaaattcagtggggcagtcacatcataaagctccaaaattatctcctttgactccatgtcccacatccaagtcacactgatgcaagaggtgggctcccagggccttgggcagcttcacacatgtagctttactgtgtacagtcccactctgggctgctttcacaggctggcattgagtgtggcttttccaggtacactgtgcaagctgtcagtggatctaccatttgaggtctggaggatggtggccctcttctcacagctccaccaggcagcgccccagtggggactctgtatgggggctgtgatcctacatttcccttccacactgacctagcagaggttctccatgagggttctgccctgcagcagacttctgtctggacatcctctgaaatctaggcagaagttcccaaacctcagttcttaacttctgtgtacctgcaggctcaacagcatgtggaagctgctaaggcttggggcttgcaccctctgaagccatggcctgaactgtaccttgtccactttcagccacagcttgagtggctgggatgtaggacaccaagtccctaggctgcacacagtaggggggatttgggcctggcccacaaaaccattttttcatcctagacctctaggttcatgatgagagaggctgccacaaaggtccctgacataccctggagacatccccattgtcttggtgattaacattgggctcctcattacttatgcaaatttctgcagtcagcttgaatttctccccagagaatgggtttttctttcctatttcgttgccaggctgcaaaaattccaaacttttgtgctctgtttcctcttgaacacttcactgcttagaaatttcttccaccggtcaagttcaaaattccacagatctctggggcagggacaaaatgccaccagtctctttgcatagcaagagcaacctttacttcagttcccggcaagtttctcatctccatctgagaccacctcagcctggacttcattgtccatattagtatcagcattttggtcaaagctatttaacaagtctctaggaagtttcaaactttctcacatcttcctgtcttcctagccctcaaagtctcttagaagttccaaactttcccacatttttgtcttttgagccctctaaactgttccaacctctgcctgttacccagttccaaagtcgcttccacatttttgggtatctttatagcaacaccccactctgcagtatcaatttactgtattagtccaatctcatgctactgtaaagaactgcctgagacttggtaatttataagggaaagaagttttattgactcacagttccacagggctggggagtcctcaggaaacttacagtcatggcagaactgaaagcaaacatgtctttcacatgatgacaggaaggagaagtgccaaataaaagggaaaatgccccttgtaaaaccatcagatctcaagagagctcactcactatcaggagaacagcaacatgggggtaattgcccccatgatttaattacctcccacagggtccctcccaagacacatggatattatgggaactacaattaaaggtgagatttgggtggggacacagccaaaccatatcaaccttcatactgttttatatagtggctatacaaatttacattctcaccaacagagtatgagagttcccctttctccacatcctcccaaactctgttattttttgtctttttgataatagacattttaattgggataagtttatgtcttattgtggtgttgatttgtatttccatgattattagggatatccagcattttttatatacctgttggccatttgtatgtcttcttttgagatatttctattcagttcatttgcccatttttaattggttagttgtatttttttttttgctgatgcattatttgagttccttatatattaaaattattagtcccctgtcaaatagatagtttgcaaatattttctcccattctgtaagttgtctcttcactctgttgattgttgctgtactgtgctgaagcattttagcttgatgtaatcccatttgtctatttttacttttgtatcctgtgtttttgacatcttagcccccaaaatatttgtccagactaatgtcctgaagtgctgtcccaatattttcatttagtagttacagagcttcaggtcttacatttaagttattaatcatttaaatttgatttttgtatatgatagtccatttcctcttatgtaagcataactactcttgcatgcttttggtttccacttgcatggaatatctttttttcatcccttcacttgcagtctatgtgtgtctttacaagtgaagtcagattttcgtaggtagcatatagttcagtcacttttaagtccattcagccagtgtacatcttctaattgaggaatttaaactatttacattcaaacttattattgataggtaaggacttactcttgtcatttaaaaattgttttcttcttgttttatatatttttgtttgtttctttctttctctcttatttcttatcttaatgatttggtggctttctgtactaacaatgtttgatttctttttcatttatttatctgatcttccaatgatgtttatacttacatgtattttacaatggtagatattgttctttcatttccagatataggactcccttaagcatttcttgtaggcctgatctagtcatgaattctcataatttttgtttgttcatggaaaactttatttctctttcatttttgaataatagctttgatggatatagtattcttggctcacagtttttttttttctttcagcactttgactatatcatcccattctctttctgctgagatatctgtgattagtctgatgataatccttttgtatgtgatttgatgcttttcttttgctgtttttagaattatctttgtctttggtttttgacagtttgactataatgtgccttggagaggatctttttgggttcaattcatttgtggttctttgagcttcctgtatctggatgtcaatatctcttgcaagacttatgaagttttcagccattattttgttaaataggttttctttgcttttttccatcatttctccttctggaactaccaaaattgaaatatttgttcacttgagggtgtcccatgtgtcacataggttttcttcatgctttttaattcttttttttagtctaattggattattccaaaacgcttgtcttcaagtttagaaattctttcttctgcttaatctagtcttttgttgaagctctcaattgtatttttaaattttgtttgttgaattctacagttctgtgatttatgtttggtccctttttatatctctttattgaatttctcattgagatcattgttttcctgatttttaaatattgtttatctgcattctcttatatcttgctgagtttctttaacatcatgattttgaattccttctcaggcattttatggatttccttttctttaggatttcttactgaaaaactattgtgttctcttggagataccatgtttccttaatttttaatgtttcttacttccttatgttgatatgtgcacatcttgtgtaattgtcacttcttttagttttatggagtgggttctgtagagacttctctctttcaatcatctcaattagatagaatgctttcattttcttcctggttaggtaccatagtatagtcttagtatgatttatttggctataagcaacacacgttatgtctgtgaattctttagtgtctcaggctgcggttgtttggatactctggtaaggctttgctgtcaatgggtgtgccaaatgagctggtcctcaggaccctagatggcacttacaggtatcagcattagtggtggcaggcccctgttggtctcatatttgagcctctgagcagggtgcacagacaccattaggggcagcaggacagttgtgccagtcctcaggatccagagtgatgtgcatgggcactggtagtgtcaatgaatggtgggtctatccttgggtttatgagaggtacccataagcactggtagtattggcagtgggggagtggggttgctctgtcagcctctgtgtagggtgcatcagcaccaatgggatgggtggcaaggtggacagactgctcctcaagaccccaagtgggatgcataagcctgcagtgactccagtgctggagggaggtaggtttgcttttggtggtagtggcctcaggttggtggctttcaggctttgaggagctcatgcttcagtttagttatctatgttctcaggagagcctccctgatgtgctggactgtctctatcctgggttatagggtactgcgtgggctcaggtgctggtggtgtggttgcaatcctgaggctctctgcactaatgtggggggatctttgtgggtccctgaggatttggaaatgcaagagctatttggcttcagggcaggatgtagtctagtatgggctttactcagaaaatagtggtgtgctacagcaacttggacactgaaaggtgggaacctgcactaattccttctctgaaacaatgcagttgtgtgatgtcctggcagctccttatactatcctcagggcctgtgagagctgaggggctttttttgtggcttgggctgcagctgtctgtggtgggaatgtggactgctgaagacctcttactgacctaattcctgcaagggggagtctctcctggcttcgagttgatttggccagctgccttgcttccctcactgtgctgcaatcttaagcttctgaacttcagagggtctctgttgctaccctgctggattctagaattttcccatagaggctctgtttgacatttagttatgtacttgatgtttaggtctttttttgtggaggaggcaagtctgctgtgtgtctcaagtcagtcatcttgaggatatctctccccaaataatgaattttgaatgcaataagtcaagataaaatttctaagactactataaacacaaggatgcaaggagattctccgccagtacagtcccatattagagatatgaaactattataaatttcacttgaggaattaagtagaaaaaatatgaaaaagtaaaaagagccaatgactgaaaggtatataatcacctaagtgggaaaaactgatcagaaaatattaaaaagtaaaatgatccagtgactaggaggtatgtaataacataagtgggaaaaactgatcagaaattatggagtggtaatcagtaaaagtcatggaaatttagaaccaaagcattttgttggaagaattcaatcagtgtattttccaggctactgtatctccaacagctataatattttatcactggcatcagaagaaaatgatggaaaagatgttcccagctctctgaattataaaattaaattaatttaaattacattaaagtgtagcttttttgcagaaggtcatgtccatagcattccctacgagaaatacaacttgtataagagctcagaggcctcctaggagaaatggtccatgaaattcgagacttacgatttaccaaccagaatgctaagatcaatactccagaataagtaagggtaacaggaatttccttatcttttgaagggtcagactgcatgtggtaggcagatacgatttactaaatatatgcctctatatttctcagcttaaactgcagttaggacttagagcacaaggtgatttgcagtaggtgtgtttctcccgtcgttctctcattctttcatggtgacctcaaacccaccagcaccaaatggcataattaaaaaaaggagaaaggctactttacccacatctgattctatgataataaaataaacttctgttgtctaaagccactgaaatataagggtttgttactcgaaccaacgttgactaatacaagaaggcagggaatgatctcctccaataggaaagggtatattcattagtcaatttagaataatacttcagtagcaagaatcatgaaaataaatggagccgattattaccaagagcccagtgttagcgatagagtaagagaatactagttgctggagggaaatagcttcaatcagggagactctctgtatctaaaactactttaaagggaaatcacaatggaataaatgaggaagagcccaatacggctcttgctgaatcttcttgggactctgaatactgatttgtactccagttccctgaacccttcagtctggagctctgtcataagctgttaccaaattgactgaggtctctcatatattccaccactttttgtaaggctgattcttggaatttttagacccccttgacagacactttctgagccactgatcggctagaataagactgattggttttgaatcctggcttttccaagctggatgacacacttttaattgttttatataactagctcctctctgccttactttcttgtctttaaaatttgaataataattattcttacctcaaagagttgacacaaagattaaataagattatcatgtaaagtgcttaaaacagtttgcataaaactacaatattcagtgtggttaagttccctcattattattgttatttttgcacaggtgtccaaaagatgctgagggatggtacccaccagaagccttgacactattcctggatctctatttagggtatagtctctgggatttaaattctgagcacaaattagtatagagcttattcctcttgggaatgggaatatggatttatgtgttcttcccatatatattccattgttgaaaattgcaatttccttggttttaaacataaattgtttttatagcatttagtatgaaagctgagaaggtagtagggtatagccagagaatgaagtattagagttaatatttcaggattatagtagttttttttttccttcaacttcttataagaaatatttgttctgttttcagtcagtataataccactgcttgttcttttcatcagggcggccttagggaggctggtattattcattcatttctttattagaatgctggttatacagatgtgttcactttgtgacggtaaatttatagactagacatttatagagaaggtgatttttcaataggtgtgtttcctgtgtgtacagtatgttataattcataagaaagtttgaatggaattgcaggctggtgttccttacattgtagtgctgacttttcttctagattggaaagtttaagcacatctacacattattttataacttgtgttattacataaaatagccgttatcatgaatgtagtaaccataaggatgcaattgttaagaggtgatatatttaacttgaataaaacttagattatcttagctgaaaatgtaaccattctcaaaaaatagccattatcttttgtttacttctgagtgtgtaacaaaagtgtttggtcttgcatttaaggacgattgcttttcacttatagttgtcaccttatagactcaaatttgctcaccattagaaaaaaatctgataaaactgtgtaacttaattatgtattattattctatttgacatttaaactaatttggagacatatccaccttttatattgttaacataaataaagtaaatatgtagcaatttaaaagaaaaatctattatgtagttcattgtaaaatatccaaagcatgttgtgaacttttaagaaagacaacataaaaaactttatatatggtactctattattttagtaaaaaataatgggtaaggagagagaatacatatttattttttcttacatatgcttataatatatctaaaagaaaacataagagagtaataaaaatgagctttttttggtgggatggatgggaacaggagaaattgggaacaaggtagaaaccagacacataacagtaaatatctttatgattcccagttattgaaaaatataaatagactgcctactccaaattaaataaaaaacatacaagtctataataaacctcttaaaatatgaattctctaggtctggggggcctttatgctcaagactcatatcaaatcatagacatacagagataatatacacctcctggaggaatgaccctgtaagcaaaggaatctagcccgttggggagaaaaattgaggggaggaaggaggaatctaaaaaagatgtcagacaggagccaaaagagaatcttgttgccttgtaaggtagctcttgttacaatagctgtgatggctaccaactttgagaaaaaactgaagtgtataattttcacagacttttccttcacacttgggaggatatattatgtatttctcccagagttccaaggaatagatttatgattttaagttatagataaaatgagtcatgattgaaaaggaaatgttttattagtattttttcttttgagacagagtcttgcttgctctctcaggctggagtgtagtggcgtgatctcagctcactgcaaccttcacctcccaggttcaagggattctcctgcctcagcctcccaagtagctggcattataggtgcatgccaccatgcccagccaatttttctgttcagtagagacagggtttcttcatgttggccaggctggtcttgaacttgtgacctcaattggtctgcccgcctcggcttcccaaagtactgggattacaggtgtgagccaccacgtttggccatgttttacattttatatactaagtagaaaatactcttcctgtctcttagcaatactcattgaagtattattatattatcttttatttttatataaattgatcttttataatcacagccctctagaacatcatgttttctgtcattttgaataaagtaaatatatggattaatatatttaaaccagttgattaaagtagtagtaatttttttctccagaagagagagagagaaatgatggttacacagaaaaagcttacattttctgaaacattgctaagctattctgttttatttatctgcatctttctgccaaacaaattttaagtgaaatagctgtcttagtccattccggctgcgataacaaaatatcataaactgagtagaaatagacatttctcacagttttggaggctagaaagtccatgaccaaggctcctgcagatttggtgtctggttagggcccatattctcacagatggcaccttcttactgtgtcctcacatagtggaaggggcaaggcaactttttggggcttgttttgtaaggacattgattctattcatgagggctttggcctcatgacctaatcacctccaaaaaggcctcacctcctaataccaagatcttgggggttaggatttcaacatatgaattttggggagacacagacattcagactgtagcaataattgtcttaaatactatagaattttctaattgcaataagttttaacataaatagctctgctatgaaaccaagattctaaacataaaaactgtcaagatttcctttgtctgatatgtacattttaaaacattgtttaaacacctcgtttaaaactttacaacatatatgttgtgtgtagtgggtatttaattttgccttgtctatgtaatactcatatgaagaagacaaacatgatcattaaactagtaaataaaatcttctcttcacatagtggaaagtcaatttgattagaaaatacatatattcaagtttagcctcttccagttaccatctatgcaatgacatgggaggacagggaaattgatatgtccaggtcttgggtgcctcatggttaagtgcagatgacattatctaatacacacaggatagttaatggaattaaataataaaattgtataaaacatttaataaattgtaataatttataaaacattcacttgcttatggtatagataaaataaatctctgcaatactttgttgggaatatttttctgcagggaaaaattatagcaacaatatctaaatgaaaatattgctttgcaataaatacaaataaaattctaactttctagaagaacaagacttttgttttgaaatcactattatataactgacaactaacaataataagttggctatggttggaccacactaatttttcagttttttatcttttgactggatgggaaccaacctagccatttgtgtgatactgccatttgtccactgtttttaaaaactattgacattaatctaagattgacttccctgaagtcctcttatgtactgcatcaatatttcacactaaaaattaattaatttgatagcttactcattgctgccaatggtttaattttttaagctactggggtcacacacacaagagtgtggatgttgcaacatgagacagcagagtgatagagagtttcaaatttctggacaagtagtcattaggccatgtctacgtactaataaacttctcatgtaaatcgctttctctgtcatgttttttttcttaatgtacatctataagtgacaaaatggtgaataaataaacccacagatggttttatcttaatggctgcatcatgggatgcatcgttagtttcatgtctgtgctacgcaaggaacactggctttactgcaggcatctggctggcagttcctcgggggtttgtcacacacataatccaagcatcccagctgtgttttcagttctctgctgtataatttggcatggaaagatgctcttgggccagcctgatcctttaggcaattctgtgagcagctagaagagaacttgtacatcccaaaactctattatctgccctgactcccttctttcatttagattgattgatttatcaacaattttctcttcttagttttgattagtgatatttagaattattgtaaaacagaagatgcttcatcttaactaaaagtgttgacataatgagataaaatatatagtggaataataattaaataacgagagccctactaaattcaattacaagtattgttgttttgtattttagctcaccaacttaaaatagcagctagtgtgcagtttttaccaatgccttcctaatttaccatacaaagacaaatcctctcagattaaatgtctataaagtatgtctgggagaatttctaggttgaactcatgaggtcaataatttatttatgaatcttctgtagcttcttggatgttgtagggacatatagtaaaaacaacagacaatagcaaaagtatgcctttgcaatatatgatggagcatataaaatatataaaaatggaagaaagtataaagagggcagtatcagatgaaatcaggtgaaatatgacttttgccttcttatatgtgcagattgctgatttgatgctcatgaacttgtgtattcgtaagattttctgtgataattttgaatagcaaacaacccacaatacttcaatggcttacatcacaaagtttttattgcttattcacaggtctgtgggatggcagaggcatctcttctccaggccctgagtgcattaggtgtgttcgatatatctggcattctgagatccaggctgaagaaacactggttaacagggtcatatttttctcatggtagcagggaataaataagagaccaaaccaaaatgtgtaagcatgtttaaagctgctgtgtgaaaaaagtgtatgccatgtcctatctcatttccttggtcaaaacaaatcacataatcaagccagtatcaatgggatggacgctcataattcttcagtgttagggtgggggagaatggatatttgtggaataataatacaaactacccacaatttgttttctgggcaacaaatattaacttctttttcttctgcccacagaatgtattcacccctactccaaacaacacgtccatcccctcaaagttgtacacttttacagcatcagacttaagtcttaaatcttgtgataatcgctacatcatgttttctcttcagtcccagaattcaatcatggaacacgaaaggataatcttcgcaaagaagaagtttcctggtcacctacatttggccccaaagccaataccatgaattttagattttctttcaagcagcgacttgactgtcaaatcaattaattggggaattatactcctcccaaagaaggtgtgaggaaaaagtaaatttttttgcgcagtcatacagtgtacctcaaatgattaagtaggttgtagttgtggaactcaggggaaaaaagtttctgtacttaccctgagaaaactgttaccgttaaaatggtctcgtttcctttgataattttctcagtgccattcagggtcctcttagtcctggctccacatgaagtttgctttgctaaaaaatttcttgctgaaaagagctgggaagacctgaaaccacatgatataaatcattcaaattttaggccacagacagttattcttttattacatggaagacatagaagagatgattttcaatgaagcaatcatgcaagattcaggattacattcagaatcacaaaattagcattattagttacttgttgtgaaattgtgatttttaaattaaatattcttacattcctgtgattattaagaaggggaaagaggaataaaaactaaaaagaatgtcagctattgagagttgtgattacttggattttgttatttgagatgcttgttgataccatataatatggtttcataattttttatggaatattagaaacaaagtgaaggaaatacgaatgcaaagaagaacttaacagaaaatttatgtctagtggcatttcataaatataaagcttgtttaaagaggattgtatggagtcaaaaggtgggctaatatgtctcttaatagcatcattatgtgttaaaataccaatcaaaaggtaaaatgtatgactaagaatcactaagcaatcatagttataatgcttttggcgtaatttttgtcattatagactaaaattatttttatgctaatgactttctcaaaagatgattataaaagaagtaaatataaactgctagaaatacaaatgcttttctattttatgattttttttctttcattcgtacttagatgattttcatttatccctgcacaggtgtttcaacccttataatgaatttgattcaattcaaccaatgtttatgtagccccgaccatgggcggaacaccttaaggacaaaagtggccttttaatttagtgatactatagtccattggggagaatatgggcattgtagcttgcttttgaagaaaccatcttactcagcttttaagttgaagaaagaactagtcaatgttataacaaagtagcggtattccaataaacattttgacaaggtaaatttcagctcctttccctgccagcccactaaaatgctcagggttttggatccgacgtcatgaaatgacactgctcagagagtgtcctgcagtcgcctatttattttataacctattcagcagaaattatttccatgattgccagccactgtgcgtgtgctatatctgtgacttggcacagcagtgcttccatctgacttaatttaaacatgcctcttttccaactataacttccattaaagcctgaagcctttccaaaaatggggctagacagagcattgaactggccattcaaatatccaggttgtagttcagggttcatgactatgtggcttgccttgcattgttttttaacctattgaaaagagtatctgatacataccttttcaaggttcttgcacccttttttcatccacgctgtatcacttcccttcttcagtatctacagtaaagtgcaaaagtcatccagcttcagagtcttttcatctgtcctttcttttccgtctgtttgctcctcaggccttaaccaaagggcctggttaggtgttctgaggatggcagagactagtcctactgtgctttgtatggggttatggataatggcttcccaagccacggcacagtaatggggataactgtcttggtggtcctgggtagttaccgctggagaaacttgtatatagttttatataataaaatgatggggagggccagccatactataacacagatctagtgatcctgccccagtttcactggaacactccaggcctggtctatgcggaaatttagctcagagagaagagcactgttgaacttgatgtttggcaagcttccatcagacacatgctgtcttcaacatttctaccattaattcttaacttagcatttgttcaatttgtttaccattagttctattatttacttaatagtttttctttaaaatgatataaattattcactattttattgtcttattcaagcagtaatatttataaaatcatcattttcgatgtgctaattatactgatttcttaatacatataaaataaatatataactatttgtcttattccatttggctgttataacaaaaatatcataacctgggtcactgaatgacagaaatttatttctcacagttctggaggcagggaagtccaagatcaagaggctgaaagatttagtgtctagtgagggcctcttcctcatacatggcaccttctgactgtgtctccacatggtggaaggaatgaacaaatgcctctttaacgagggcactaatcccattcatgagaggggagctccctgacctaatcatcttccaaagtccccacctcttaggtacccacaatattgtggatttggtttcaacatgtaagttttgtggggagcaaacattcagacgatagcagtattaaatttttaaaaatctatatctaaccttaaaccatctcagtcacctttgggaaacattggtttagtcttggtgatatttggctgtgtgatggctgaagaattaggtgtctgaaggaggaaataaataatggttagtggagtctccagtcttactagttctgtagcacagcaggatatattatgtttttatgctttacattgttttaaaaatgtttttgacaaattatatagtcaaaataattatggggtccatataattataatggtccatataattatggggtccacatgatgttatgatatatatatatatatatatatatatatatgtatatatatgacctatctatccatctatatatacacacacagtgtggaatgattgaatcaagctaattaacatatcaataaccttaaatacttataatttattcctcctgtctaagtgcaactttgtaccctttgaccaacatcttcccattgttcccactctccagcctctgataaccactgttctactttctgcttctatgagatggattgctttagattccacatagaagtgagaacatatggtttttgtctttccgtgcctggcttatttcattcatcataaagaaaggcacattcttaagaggtggtttgacattgtgtttaagaacacagatgctagagccagactgcctgggttgaaataccagctgtccacccttttgctgtgtgtatgaccttgggcaaggtacttaacatccttttgctgcaatttccttatctttaaaactggggatggctatagtatcataagacattcatgaggatgaaacaagttaatatattaaatgtttcaaaacagtgccagatacatggtaactattaattgttgttattattgttatagttactctcctaagagcaggaaggccaaattaagtcccagagttttcgataacattatccagtgtgaagatctaagtttagctttaacagttcagctttcattttgctaaaacaccggagccaatatttggggcctttttttaaaaaaaataagataatttggccttatttcataatggttaggctgcttctggtaagactttatgcattcccttttcttctcctctaaagagccaattaaaagatttcatatctgaaattttatcatttattactttacagtgtgacttacaacaataaatataatcaaggtttaaaagtttaagccaataaaatactgtctatattccaaccgtaacttcttaaaacatataatgcagaatgcataatattttaattttttgatgacatactgaagaatgatattccagattatattattcacacaatgaatcaatagagcattaacttcttaaaatgctggaataaagaaagaaatttaccatgtccaaggctttttggttaattgtgcacattaatataagtgcaataaaacaaatcataccttattattttaaccttaaagacaataaatactacttggcgtgaaaacaaatatgttctctcgttcgaatgcgctacttttactctgtgaccgccatcagagtcccctctgtgagcggaagtgatgtttgccggatgaatgtagcctattccctacagagcgttacttgctgaggtaggccctctcttggaaggttatcaggtgacttccttaggtgtgcaggaaatggaagcagagtgtggactattttcttgccctctactggccgtgaagcctcaaaatggcacagctggcgtttaagccagaaagaaacacctgtttctctctggtacatgtttttttcctaccttttcagtcctcttcaaagctttcattatgcatattttgagtgtatgttaaggtctcttatgggtaactcatgaaagaaatggttctttgtaacatttacgcaatatctggggtaaaagaggataatgcaactaaaaggggaggcagggaacaatccacccctttacctttgattaccagaagtggtcccatgaggctgctgatgtatgggcacaaagtgggttatccacacatgtcactggaacataagaagggggtagaacaaaacttctgcactgaaggctctgcgaagaaactttattaaataaaatagacatctttggcgttgagtcggaaaatgatgtaccagacatggttctggttctgggttaacttaccttcttgttgagaaggtaaaataagtacatgtaagcagctaagtaatttgaaaaattaaatagtatgaaaagttccagaaggtagattttcttcaagtactaaatgaattagttttatccatctggaaaaggaaagaaataaagtggcctgatgtggcttatttgagaaaagaagagacaattttaggagaataataacataagagccaggcattgcaaaggcagagaaaattatggaggtgcccagtgtggtaagataacataagacagtcacttggtgttgctggctgatttgtgaaagcagaatgtggacatgaagtacaaaagataaagagggtcagaatttgaagggccacaaatgagggacaaagaagcccaaaatttgttctgtagtctagagtgtaattaaaagctttagagcagatgaatatgtaaaagcctgtgcatgtttttttaataggaccttctgatggtagcattatgcatttttttctaattttgtactagattttctgcaagtatattcatattaacattggaagaaaatttaaaaaattaaaatactgaatatatgattaatctatattttagacaaaacaatgtgttgattattaagattgtctgtactgggctggaggagactaaacctaaaccccagttaactctttggattggctacaggcatatcttcagtgaagtaattcctgttattgtctataaaatttaagggttatttttgttataaaagagttaagaagtagtagtcaccaaggataatatgatcaaataatttcttataaaatagaagaatctgtcacacatgcagccaactgaatgcattccacttataataaattacgtgttccaaacaggttttctactaaaacttattgaaaatagcatttggttgctatgacaacctggaacagcaattggaaactagaacattaaaggtgagacagaaaagacagacaaatagttcatatttagctaaattgtattcctttttaattcttataaatccagggaggaaaggaaattcttatcatgttcagaaatgaatagttttctaccttagcatcatatagatttagaatgtccagtgtatttacatcatctgttggttattaagtaagatgaatcaattgtcctcctttttgttctgaatctcagaagtcttctcatctatgagttttgtattagtacattatcacgctgctgtaaagaactgcccaggactgggtaatttacaagcgaaagaggtttaattgattcacagttccacgtggctgggaaggcctcaggaaacttactatcatggcaaaaggagaagcaaacacgtcctttttcacagggcagcagaaagagaagaatgaaagccaagtgaagtgggaagccccttataaaaccattagagcttgtgagaacttacttacatcatgagactagcataagggaaaaccgcctccatgattcaattacgtcctatagggtcctttccatagcacatggggattatgggaactacaattcaagatgagacttcggtggggacacagccaaaccatatcaagctttgattactttttgtagcttttgagcatttagacccttatctcaggatattatagctatttattgattgaaactctgactttcaaagtgtgttctatgaatcctaagaatttcacaaattatctctaaggtttctttggaaggaagtacggtcatatggccacttgactccagtattttccatgtcttttaggttttacctcaacaccacactagaaattataatgatgcagctcagaaagtgagcaggcagtttcataattcaaaaaattttgcaaaatttgattaaaaatctgtaaaatattttaaatctcaataattttgacatgaatttcagataaccacttgaacaatacatgacaagttttctacttatatttataagatatcctcaatgaaaatgtgcttttattaacagatagataaaattttattttgtgttgtaatttgtagtctttttaaaaatcttaaaaatcaaaaagtcacttattgacttcctagtgtgcaagacactgttaggcatggaggatacagaatatgttatagtatagtatttttcctataggagactggtgtgtccacataaagaggcataatttatacagctaactattggagaagaaatatgctgtggttttaaaaaatcagagcaagaaaattatttttgtggaaattaaaaagtaagcttcatgtaggatgtgaaaatcaaccacatgttaaatatcagggtatgaactgcactgttctgggcaaattagtactttgtcaggcaacacaagatgtgtggttaccatattcttggaagatgttactggtgggagcatatagcagtgtggaagtagaaaagcaaaatttagactatctatctaggaatatacatctgaattttgcatttatctccactctcagaagaaattacgtatagcgaaagtaagggctactcagtgacttctgcagaataggaagcaaacattaacctaagattctagaatgcaggttacatggattactcttgaaaacctccccctttgcaagcctgacatccttgagtgttagcaaaggaaaggaaggtactggggagcttttcagaattgccaaagccttctttcatctcctttacaggagtaaggaagtgtggaagaaaggagaatatccttcctgtgttggttgcagttcttattatacatccctcttctctccgacccttgtcactctagagagtagacaggggaaaaatctttaaaacctggatgcaggtgaagattaaaaaacattaattcagagattcagttttggataaatatttaccaaatacatagcaagtattctccacctactgtttgttaattaaaattaacccaaatttcccacctactgtttatttattgaataaacataaaaatttcccatctactgtttatttacagtaggtgaagaataaaaccacctactggtggagaataaactagctcagagcttacaacctagtagagatggacaaacattaaataaatacgcccacaattttaacagaataagtgcaatatgtgctcaataaatgtttgttaaattatagatgcagtcatagaaaaaactgggggaggataagcagaggtggacttagatcattagtcagggaaagcctttctgtagatggaggcaaggacagaaagacagtatcttcacttcctttatgattgtcctaaagcttctcagcactctgaactattaacttgggttagagaaaaccagtatagagtctgggaagagacaccagagttctagtggtccttaacatgttagaataagccatgtaaactgatgcgcatattagtccattttcatgctgctgataaagacatacccgagactgggaagagaaagaggtttcattggacttacagtttcacaaggctggggatgcctcagaatcatggtgggaggcaaaaggcacttcttacatggtggtggcaagagaaaatgagaaagatgcaaaacaggaaaccccagataaaaccatcagatcttgtgagactcattcactaccttgaggacaatatggggaaagtgctcccatgattcaagttatctcccagtgggtccctcccacaacatgcgggaattatgggagtacaattcaagatgagatttgggtggggacacagagccaaaccataccaatgtggttatgtgaaagttcagggaggggttgctgtggatgggtggtggaattgattagagtattaagattgtgaggtctagctttatgctccattttattcccagtaagtaatattttttccagaagtctttacagtcacaagtaaatgagtctcagcacagacgggcctgagtccactatgattatcctagtcttgtatgaagaactttatatacatatttttgtaattgttgtattattcaacatcataaatatttaaacatcaaaaacattacttctgattttttagtgccagattaaatgactcttacctattagagaagacaggaagtacatgactaagacattcatgataattttgtagctctctgatgttctttaacactctagaaaattaagactaccttatgaatttttgtgtccattctttggagagaaatattatagcacaaatttcttactgtaacatgctccgttaaatttttctgctgtaaaggatcaagcaatagaaatacacttacttttgttgtttttccctttctgttcatgtttattttataggagtttctttggaatgtagaatatgtataccttattgcagataaataataacttttcctttttaaaaggtaacctagaggataaagaaaggtttacgggtgctgatatctatggcttatctgacagagtattccttattatttccaaaatttctatattgctgtcctgcattatacacatgtatttggcatgtgagctacttacgcttagaaacgatgtatgaaagagcagcagagtgacagatgtacctccagaaggatatttaaattgatttttttcttaatacctttggtttttttccgttaaattccctctaactttatatgtcagctcacataatacagtttattgctattatggctggctttggcactattgtttcctagtcatttgatatatttggagaaacatttaatatttatgaatgccacaaaggaatattttacatttttttaggtctttagctattccttttctttacaccctttcccttttagtaaaataaaacacttttatagaaaatatcttgctttatcaaaaattcatttacagttttatggcctcttagttggattatcttttactcaacttggccctcaattttattttgctttatttggatttttcattttttgtggcatctgtgatatgttgatttattagtcaaaggaccatagaaaattttcagaactcccattttctgaacaattttgaaattaaatgaggatatagccatttattataaatcaaaccattgtcatttttataggaaaaaatagaagagaaagaaagagggagggaggaagggaagaaaataaaaagagatggaagatgttaagcttttttttctttagtgaaataaattgtaaagctgaaaaggactctagaaatatctagcatagcgatttccaacttctttgagtatgaagccctatttttaacatacgtattgtttttcagaccccgcataatagcaattgttattttggtaaatattgatcagaatatatgggaaaagatttataaattaagtgacattttacaattaaatttacatttcattagaagcatagcatctatatatatttggaaaattagtgcatatatgcaaataacatatgacattctggctgggtagaataaagatgaacattaggaaagtttatgaaataacagtatttctgcagtagaatctcattcagtcaggaaacacagaacttctccaattcattctttttatatttataaagtgaaaaccaaacagaagaggaaagttgaccaagatcagattaatgaaaaatttagattaatgtttctgctagccaaataatcttaccgtagtacaatatcacccccaataaggagttagtcaattatgtatctaataactcagatcagacccttgaggcaaagatgactttagcttacacattttttgtttgattatctcaattttgtttggttgtattaacatatattaaggcaagatttagtaattaagctgtgattagaataaaaagtattggtttataccagattaccagcaatagaaacagatttcattactttaaattaataaagaagcattaaaaagaaattttaattgagttgatagttaaacatgcacatatatttatatgattctttagatctgataggatatattactagtaatggagttctataaatatttttaactgatcacctgaatgatcagagcatgcaacagactgaacagttatgaaattttaacttcaagttatagaaaatcatgtgtattaatgtgtataattcttcattatatttctgatatcgttatgaacaatgaaattcccctagacagccctgcaaaaactgacttctgggattatgaggaaggtggaactggctcctgaatgaggtaggtcatgtattctacagcatagacatgttttgaaaagagcaagtaaatctcaggtgaatttggccaactgcttatccttacatttaagccagttacacacccacacagatgccaaggtgtcatctctaaaatattgggagggaaaaccttggattcaatgctgtcttactggaagtgataaccaagcattactcagataaaaaaaaaaaaactttttgcctattgctgaagtggttatatagtaatgattttacttttaaactttcaaatatttatttttctatatcctggcaatactattgatagtgctcaggagaatcattaactgttattagataaagtataatagaataaataatattggttagttaatgttggattctgaaaacatctcaaatgtattaatgtaaagttgtaataattttaaacattgtaacaaatctcctttgaagatcctatttgtcactgttcgatctggagcgcaaatgaatgaagcctgctgtgacttaggctgaagccactgtatggagttgcccatgtgaagagccactgagtgcagatcagtggctggaatttaggctgtccttccttgagacgtattgatgggcgcatgaagcagatgctcactgggaattgcagacatttgaaagtgaatggtgagagtgaaggagttcgtgatatatttgggatattatatagattccatagtatacccttaagagtcctgatatcacttttgaaaacgttggattccaaatagtgtttctctattgatgtttcagagcctctggagattcagcgatcgacttattcctgaaattcctttgtggccacttttactgagatcatccttctatttgggggcttgaagaaagtgatgcattttaggtgttgaatagatgctgagctccttagcctaatcagtttgaagttctcatttgagtcttttttttttttaatggacaaagacccttaacttgtgggggacctctctcctgactgccagtcatatggtcttgtttggtatgagctgacctggagcccagctccagacatacacaattcctcacataaccctaaagtctcttctcgcttgccctagaaagagcccttaatttctggatcaatttgcaaacaattcttaaacttctaattttgtttagttaatttggaactaaaatgtgtcatcagaaaaccatgtgtcttctatgacaccttatgcatatccacaagagggaaaaattaaaatcctttgttaataaaattattgaatatttgttgctttcccccaactcccaataaccttgtaacatttttccaaaatacaattttgttgaaaaattttaattcatagcccctacttttttccatattgtatgggaaaaaaaaggaagccaagagaagcttccatcagggctctccaaagagcatgcctagtaacactcagattttatatttaagacaactcaaactgtgatctctgaactcagtgatgacccatccagatgttttgaagtgacggagacacaaacaaaaaaagctgttcttgtcagccagtcaccttaaaaaacatcatatctaaaaagaacctgtaagaatttattttcctgataagtcaaacaacatccagaataactgctgaacagccttagttaatgaatgtggccaacttaaactgatataattctagcctaaagataagaaactgtatgttaggaagtctgtgcaaacatattgaggatacagttattattatagtttgggcttcctgaattactaataccatgaagatccttcctgacaaaaaatgccttcattcttgctagctttgtaggcatgagagacatttgggcctactgatatataggaatatctatctagtgcttatgttgtaatttactggtattctttcccaaagaaggacctgtttacagtagctctgggcatgagtaactgagagtagggtggcatgaaaggggaaaggagatccccttcagaaccctagttctacaggtatttggagaagccatgggtatcaccaccatcaaccttgactgctgctaaagaattcctgcaaatatgcctccaaatgaatttcttatctatgctagccatgacacttgattcatccttccattacagcatttatacacagagttattattttatttctttctctacactggactctgagcccctggaggacagctctcctaccatggctatgcccagtgatgctctttgacatggtttccggggctgagctatagctctgttgcctggaggcgtatcagttttccatttttcattcagaatcccagcagtgtctgtttctcgtgaataattagctagtgtgaaagtcacagaatccatagcctctacaaggtgcaaatttattaactgcccatgattctgcaatgaattagtgtttttaaagggaatataagaaaaaggaagtgatagaatagacattattgtagttattttagaattctattttttttttttttgagacaggattttgcatgtccccaaaactggaatgcagtggctggattgtagctcactgcagcgtcaaactcctacctcagcctctggaatagctgggactccagacggagctagaattctactgtcacgagtagggtgcatttaataatctttaaggtctttccaagtgctaaaatttctgattctggaagatttgtccttattgtatcagtatttacttcctttttccaataaaacagtccaacagatgcttacagtgtacccgtggcttatgaaaccaaagacaggaggaagttagaggaaagtgtacttcctataagacaagtaatgttatttaacaaattctcatgcatttaaagcaacataatgagaaaataccaattctactgaagctcattatgagaacattttcagagttcatactatggacttgatatacattaaattcttaagaacttctctccagtattcctggaaactaggtatcacagtccttgggtagactgttttaataaagagagcaggtcaggttatgaaaaatgcaggttttccaatgagctttacttctaatgtatatcgtagatcactgatagatgattgcaaagaaatacatacatttcattttacctccaggaaattcccaagaattcagaatgcctactttgtgttgacggttttctctggagttgcaaacactgagagtgaaatcagtttcgaaaaccatgcttcaaatattcctttcaatttgctcttgtggcagttttcgtcaaacaacctgcttggagataatctatttgcagaacctaggtggggacaaacctgccacattatataattcactgagcaggttttggctctcacttcaccaatccatcttaaatagtggctagtgccctgcatctagcaatacatatgattaagcaatttagcacagaaagagaaaggccacacaacttggcaaccccgtagacatttatctttgagaaaactaaacggatccaactttttgccagagtttaatagcaaagctgtcacattttacacaaagagtatccagtccgctagcgaatggaaagaggggacagggaggaggggaccagaggaggcgggctgctgactggactgttttcaaaggggctcccgtgtttaggggaggtgctgggatgctccacatggctggagagacgaagtagttaaaaattattactagggagggggccggaacctcgggacgtgggtatataagacggtgcctgagcgcagagcggctgctgctgctgtgatccaggaccagggcgcaccggctcagcctctcacttgtcagaggccggggaagagaagcaaagcgcaacggtgtggtccaagccggggcttctgcttcgcctctaggacatacacgggaccccctaacttcagtcccccaaacgcgcaccctcgaagtcttgaactccagccccgcacatccacgcgcggcacaggcgcggcaggcggcaggtcccggccgaaggcgatgcgcgcagggggtcgggcagctgggctcgggcggcgggagtagggcccggcagggaggcagggaggctgcagagtcagagtcgcgggctgcgccctgggcagaggccgccctcgctccacgcaacacctgctgctgccaccgcgccgcgatgagccgcgtggtctcgctgctgctgggcgccgcgctgctctgcggccacggagccttctgccgccgcgtggtcagcggtgagtcaggggccgtctccccgaagaacgagcggggagaggggaccacggggcgcggcgggcagcctgttctcgggcggaggctctccggggcgttggaaacctgcatggtgtaaggacccgggaggaggcggggagaaattgattgtgctgttctcctccctctcttctctaacacacacgcagaaaagtttaaatttttgtgaagcgcttgcttacgtagctgcggagcgagcctctgcttcattacgagcggcatagcctttttcaggagtgatttccactttctttgtgagagagttgaccacacggccgggctcagcacctgccaaaggggtggggtagggcggaggcagagggaacccagagacagaagagccaccgcagaaatgccaccctctgtcgctctgactggactttggtcccagcaccgtgttcactcggatgctttctgtgaccagatcagttcgctgtgggtcgcctccggatgcctgggcattcggtctttgttctcagcaggactactggcaaggaactgaagtgtggtcattgcgtgtagatgcctttcctttgcacactgcgttccaagttggggacttcccagaaaatgaagtcagctggagttgggccgaggtatacttggtaatgactgcaggttcggcacacagtaggtgcacaattaagtcggtcgagtcagtgcatgggaaatcgatcaaaattggcaagcttcccaggttgtctttgatttttctttttttgactctcactgtcctgtcgttgagcgatttatattgcaattactctcccttactttttgggacggtctcttcaaaaggatacagattctcgacaacctagggtgaatgtgcttagggccttacataaaggctgatcatagctacactttattgaaatctcttactatgctcattgaaacattgcaataagtatttgttggatatatgtgttttgagggtgaaaagtttttttaaaacataaaaagcacaaatagcccttttcacttttgtacacctatacaacaggtgtcactagatgtagaaatagatgacagatgacagcaagtaattcagctgtgaagccagacctttagacattggcatattaagcttaattgtcactgatcttccccttagcaatttgtgatgttctacagcttcagaatatagttcttacatgtgtagttaccgatcactctacacttttttcagaattttcagaatctgtgacattagatccttttcctccctaagttagctgcaaagaaaaaattcattatatagactcatctgattttgtgaattacttatctgtctttgtatttatcagaattattcatgcaactgaatgaaaagcagagaccatgctttgaacataagatgttttttactcattgacctaaataatatcctttagatatgctcttgttcctaggcctcaacattttaaagggaggaaaaataatatctaaagtaaaaacagagcttaaaaaattgttgaagaggtgtattttgcgttctatgagtacataattttttccaaatcttttgttaggttttcttattaagcatttataggcatcttgtaggtgacatctggaaaatttctaattaactgaacatgatctatttgatttagcataaatgatgatgtttatttgatattaaaataattagttatgttttccttatgaataattcaattgtctttggtcataaaattcacattgaaatttaaccatctataaattgatttgtgacttttattatttgaagactaatttcttaaaaagatatattttgaccacaatggccagagaacagagcagcctgaagcctgacatttttgtagcaatagtttctaatggatctattgtctacctggtcaatgtaagttttgaattggtgcatcaatttttcgtgccacttgggaccattcaccaaatctttattgaagagtaagagcctctttggggctgttattaggaacatacttgcaacgtatggaatatatttctatttgttaaatttcagtacaacaatttataatttctatgtaggatactcaaataatcactgaccgcagaaaaatagacactcacaaaataattctccacataaattatatttaataccttaaaatattcaataaggtactttccaatacttttaaatacatcaccttttctaaagtttagagcattacctaaaaataaagtggatatattttagcaagaaatgacatttcaaacaacttcgtcatcgtaatctgacccatgagatttagtggcatctagtagtaataagaaagtattttttctaggtcagtggtcatgattattttgatgtacgaatatgcaaaacaagatgtgatatgatgatagtaatcaaagcctatttattgaatttatgatgctaatttggaaactacctttaggagcttagacctgtactgatttcttactacacacagatgtgtagagaatatctatgggagctgcaatcatttaattttgtgaagtgactggtgagtagtgatgtcttctttaggacaaaggtaaaaggattttacttgtaggcataaggataaatatgaaggattccaaattcaggtctctaagttgggaggatatgtttgaagagcaagtgatacttttaaacatttgaagtgttttgaagtaatgtgtttcttttttttttttccttttttctttctagtgtgcatagcagtgatccccaacctatttttgctgcaaaatgacattaggaatatttcatggtgcttccagatttctccaggacactttaatatatatcagtttaactttattaaaactggcacatgttttatttaggagactgggtgatttagaggcctctcttcttatcctgtggataccatagaatattgcaaattcatgggtggtgaacagtagcacatacattaatacaatatgatataatatataccaagggagatacaagaaaaactgctgagcctttctcagcctatggaactaatctatgacatcatcaaaagcataaaatgatgacagtgcagttttcagagatgcaattactttaagtatctctcgggcatgaaaggaacaaattaatcttattaccagtcatttaatgaactaaccatttatcatagccattattcttcaactgctgtttgtcatcattttatggttttgttttataactctttcccaaagatggcagtatctgttacattacctttataaaaggtaatgtattttatatatatatataaaatatatgtataatacatatataatatatataatacatatatgtatatattatatacatatatatgtataatacatatatgtatatattatatacatatatatgtatataatatatacatatatatgtatataatatatatgtataatatatatgtatatatgttatatataatatatgtgtgtatatatgtatatgtgtgtatatatgtatgtatattatatatgtatgtatattgtatatgtatgtatatatacattgtatatgtgtatatatatgtattgtacctataatataatacatatatatgtataatacatatatatgtatacatatatattatgtatacatatatatgtaatatatacatatatgtaaatatatattatacatatatgtatttatatataatatatattatacataatattaatatatataatattatatatattatatataatttactatatataatatatatataataaaatatatatatataataatatatatataataaaatacatatataataatatatatatatataaaggagtccaaggttaaaattcagaagatgcactcacaaacaatttttactatttacaacaactttctgtgtcaggaattcatatacaagtagatggatgtgtgcgactctaggatgagagtgtttcttttactattttaacatattcctcatgatataacacaggatgacaacttggctaaagttatactctttgtaatgtggaatgcattcaatttggatctagtttgttttatttggaaaataaaaagactagataaaaatttattaaaggcatatatggtttgaaaatctgagacagaggcaacattaattcttatttaaatatttgtaacagaaaatctaattctgtttagaaacaagctctcaatgcacaagccttgcttatattagccacccaataatcaataacagattaatgcttatgattctgacatagataacatgcacagtgtttgtgttcatcaatcccttttgttcatgaaatatttcacctttatattaggtttgagacatatggagacagcatagaaacctggtaaaagcatggagtgtagagccagatggcctggtttcacaacccagcttcagcacttgtgagctgtgtgaactgccctctttgcctcattttgaaaacagataagagcacctatgtcataggattgctaggaatattaaaaaggttcaaacacagttatgcagattgtgcactgtgtcgaggtacaagccaaagagacaggagaaggagctcagcttggcaagcccagtgcctgtagctcaagctacctagaggcaaaatcaactttttctagttgaacagtctataagagggacctttctgccatctctcaccaggagaggtcgtcttttcccaatttatcccaaagcatggattgtggtagaaatgaggtgctacattctaaattattgctaaatttgaggcttttattattagaatcattacttctataaaactcataactggtctcattatttaagtaagaagactgaggccaggggtgattaaataatctcaagtacccaaagttcaagtgtagagtttggtttcaaagctaattcattttgattggctacatgaactcttaagtcacaatgatacttggtttactacttattattctaatctccattgtaaatattctgattttttaaaaaaatagtctcatgctcttctcagaaagcttacgcattttccaactggaaaagtagggcttgctgctgctgccaccatccagaaaatgaccacaacctacatttataaacttaatttaaaattataaataaaattataaataaatttgtttattaatgtaagaaaatagactccagctatagtgcactatgcaattaagtacattataaaatctctgttgtaaaaataaaagtttattataataaaactctttataagaaaaaattttaagaagttggtgtaacattgaatgctgaacgcagaacacttgaacaccagtcattttctttttagttcaaaagtgttggcactggtatcacagtccttgctgcactgtgtatggtagtatcaacatatttatcagtgtgattgtgaggggggtaagaagaaattatgaaaaagaaaaaaatatcttgtgtgattctaataaaacattctaagttaattcagtctggtttggggaatatttaccatgtggatgctcttttttacttttttttgcaactaatggtagatcataattgaacagcaggaatttgtaatatgtcttttatatttttattgaaaaagtgatataaattcaatattcatctaatattaataatatataattatagcgtgagatattagaaaatatttattattttcataactaactgagcactcaactatcagaaaataaacaaatataagcaaaaagaaaaccaaattatagatcctttctgctcagaaagaaaaagcaaactaccctgacttcatgagtttggccccactttatatcattgccaagagcatttaaacctctgccaatagttagctctatagaaattttaatggctaaggaaaaagacaaaaatcatctacttattcatggaaagagtgatgaaatctttgttgtgacagtgataggagtgttaataataataactttctctaaataaaagggcctgtttatttatgtagctgtgtgtgaaactaataaggatgaatatttcttttatataaaataaatgtattttatttgttttaatatataaaatatgtattttatttattttatttatttattttaatatataaaaatacatatttattttatttattttaattatttattttaatatataaaataaatatttattttaatatataaaatatttattttatttattattttaatatataaatatttattttatttatttattttaatatataaaatatttattttatttatttattttaatatataaaatatttattttatttatttattttaatatataaaatatttattttatttatttattttaatatataaaataaatattttatttatttattttaatatataaaataaatatttattttatttattttatttatttattttaatatataaaataaatatttatatactttatataaagaagcctcttttatataaaagaaatattctataaaatatttctgtaaaaattcagtgcaatctatacgacaaacctccatgacacacatttacctatgtaataaacctgcacatcctacatatgtacccatgaacttaaaataaatgcttaaaaatccagtgcagaaaaacttacatatttaaatactttttagatttaaaaattaattagctcctagtgcacatctagcaaataaattatcttggattttattttctcaatatgtttgtagagaaattatcttgaattttattttctcaatatgtttgtagaatcctgggcagatcttttctctctcttgtagataagcccacagtaaaaggatgtcttcaattgcagatgctagttgacatttagtaatttatagttcgacggcataaatgtaagcttagtgtaatagaacccgttatatggttctctgaatccttatctatcccataaaatgttgatggaagattttatctgaacataacatttgaaaataagagacagagaaattctccacgttatctcacagaatgagacgagaggtaattgtaattgttctctaggaaaattggcttttacagaagtgggaaagttgcttccagaagatctgcattaacaaaacttttctgggaattagggcaacatttgtttcccagctgttggagtttcactgcattagtagccaaatgtgatcagctgaaagagtggtgagacgttcaatagctgctgcttctgatgattttgctgcaacttggaccaaatttgcacgataaggtggaagtcagtaataaaatagaattgaatgtaaagaaattcagtgtcagctttaactgactgtatataaacccataaaaattgtgcaatatatttataatttcctgaaaactgccttgctagatctgaactgttagtgacttttcagttcaaactctgtagacacagctgatgatcaaactttagagttaatagatctgttccagttgacggtgggctgctgtcttgatgccctgagagtctcccgaccgtgcagccatcacaagctccactccctcaagcaggaccggaggactgctctattatccacaaccagagacacagcctggcacagagagtgtcaagctgtctatcgtccagggtctggacagcactgattgttagttattttaaatataatctctctccctaggtttttttctttcattattattatatctgtatgaactaacataatggtgttagaaatttccacatgaaacctaaagctctcatgcatttaattagaagtactatcttaattttatgagttaatttacatcaccatttctgtatgctcatcatgagtaaatctgtgctgcatttattttttaatatatcagggataatgaacagtgacttttagcatatgcatcatacccaggaattccctgaatgtttggggctttgttacatataacaaactttttactcactgaaaggtctggctattctgttttgtttttttttaatatgacattttttgacatcttgcaaaacaatcttcttagggaaatttaatatttcaaaagtgctgggataaaatccaaggcagaaagttcttggagtgaaaaatcgaacaagttaaaaactcaagggaatgtaattaagatatatttggacacttagaactatgtaaaggatgtagtagatgaaaatggaaaccgcatgcttctaaatacagtcatgaaaatacaagcttaatggcattgttaggctctgactgagaacaaccattttaaatgatgaaatcatcacaaaacttagtaatatattaggagaaattttaaaataatacattaattttcagagtcaaccattggggctttctgttaatttgggactttcatgatcatctctcaaagaatatttattttcaggctgatttgtcctcctgaagtttctctaacttatttcccatggtcattcatactaatatgttctttttcattaacaatttgggcagcctgttaatttgttcagattttttagtgtgttgctgctgggtccagatcacggtcacgaaacagagggaacaactcttggcttgcttgcattgccagaactactattttatgattggttgttctcagtttgtgtcaagatattgaatgcctatcactcaaacactgttgagaagttaatgaccttccactgatttctgtgcctttctccctctgagtgtcatcataggtcattaactgctgactccagaaaggaatggatatgatacactggctcagtgtgatgtactgtaattaaagtacaaagtttgaatgctttttttttttgccagtatttaaatacaagaatctcccccacccccagaaatccctgactactgacaacttttattgataggctacacaattaaatacatagtagaaaaggccataaataccaacaggaataatgttaatggagatgaattgtaagaaagtagagaaactatttcctaatttcttagcataaagtaatttgtctaaattttacataaagtaattgacagtctattttccaggtccaaatctaagctaaaatagggcaagactcagaaagtagaagaggctatggactatggaaagcagtctgggcataagaaatagtaacagagagggatccttggcggttttaaaagttgacagcagagagcagaggtgaacaaaagcagaagcagtgaaaatcaaaacaagacagaatgaccattctggagattgtttataatcttgccatacattcttagtggtaaacaagggtgagtgtagacaatagaacaatagaaagtccattgcttatagaactagctaaatcctatacaccgtaatatccttgacatcaatctatttatatctgtttatcgtctgtctatctatctatctaatctggcatatatatgtaaatataaatatatacgactttattatgacctgatatgcatatttgcagttatttcacttgataattaggaaaattagcactgcttaacatgtagaggtatgcgaaatttaattttgagatttttttttcaaactctttttgcctatgtgtttaagacttcacagatgttattagagcagaatttcattatgacgtctcaaaaattcttttaagcttgtttgtgattctggccaatatcttgaaataaattgattttcagtatactacaaataatgactttattgggtatagtatagactgtacataatcaatagatgtcaggataggtggttaggtggttaaatggaatgctgtaacatgaaaacctttaagatacaggtttaagataaaaaatagattttaaacttcccttccaaattcagagtattctatgtatgtatttatagattttagatatttggttggtcctaatctttattcctgaagaaatatgtaataaaaccaccagtagtaagattaactacagaaaaaggtgaatttaaatgaatttgtatttaagtttaacaaaattctgagttagggaaggtttaaaaaatgtaatactattactttcaaactcataaacgaatgaatggaacatttctaaggttaaattagaggaagacattgttatttcatatgtgtttaatatataagtagagcctctaaagctgagagaaataatttgttttcaagtctgctaaatgtttattaccttaattgttttgagctaataatttaactgtctttgaaagaccagtttggccaaatttcagcctactcaggtctccatccaaattgtaagaaattgacaacaaccattgataagattttactagctcttttatttcatgatatattcattccactgttctctaagccatcatttttttcacatttaaagtatattcctttttttaaaaaagtacttaattctttaagttcatagttgggagattttaatttgcaatttatcacttatcagagatgtctctgtaaaatgagagaagacattggcctaggaattggagtttacacacaatatctccccaaagaccccagaaaatactcaaaaaattggtaatgagattttttcagagatagtgagtactttagaactctatcttgtcacttccaatgtaatattatattaattaatcgtttattactaccaattaccttcattctgtccccttttaactttcaattttaatagatttgtttcgggtataaaaaatgaaagcaaatatttataccttaaatctgccactttgtatcttcttcagaacaccttacataaaattgtttcattatatattacttgtttttgataattaatttgctttatgaattgttattcttctttcattaagttttagctcactttactatacactcctgaaattcctttagctattttcatttgctttgttaattggtttataaaatctaagccagaagagttataacttcccttacaaaccttgcttgaagtactgggtttaaaagtttatgttgcaagtttacgagggaataaatttgcttttacaaattgcaagcaataggctagaaaataaactttatgaaataattcagtgggagaagcatttctggtaatgtattttctgctttgactggttcttacattttgattcttagtgttgttacaaatagagttccgattatcaatatatgggcatctttttttttttttcaggccaaaaggtgtgttttgctgacttcaagcatccctgctacaaaatggcctacttccatgaactgtccagccgagtgagctttcaggaggcacgcctggcttgtgagagtgagggaggagtcctcctcagccttgagaatgaagcagaacagaagttaatagagagcatgttgcaaaacctgacaaaacccgggacagggatttctgatggtgatttctggatagggctttggaggaatggagatgggcaaacatctggtgcctgcccagatctctaccagtggtctgatggaagcaattcccagtaccggtgagtatggatcttgagcagttggcaggtgctctggggaactccaaagatagagggaggactctgttacctgtagaggatgtcagagtaggacaggcagaatcatttagtaggcatgtatctgagtgttcctattactctctgtttgcagaaactggtacacagatgaaccttcctgcggaagtgaaaagtgtgttgtgatgtatcaccaaccaactgccaatcctggccttgggggtccctacctttaccagtggaatgatgacaggtgtaacatgaagcacaattatatttgcaagtatgaaccaggtaagcagtagcaaaagaaggtatagaagattttgtgcatgtttaattgtattaagttttgtctttaattttgactacctgtggctctttttgtttttctgctgtgaaatagaaaattaccttgcagtttctcatatcactcgtgtaatgaagcatatcatatgctgtagagcaaactgtccaatgagctcaaagaagagagtaaataaaaacagctggagagatgtctttaagaaaaaataatcatttcttacaataaaaccaaatatttttgtaaatagattttataaacaataaatattttaaaatattttaaacattactataatatgtgggaagtagatgtaagttaccaaagcacctatagacttacacatgtgagcagcacttctttatctgactttaagagaacaaagcactttctcctggatcatttgcttatcattttatggtataatacttgacatgtggtactcagtaaaaagaagactgtcatagctcattgccccatagtggaaaaaagtaggaagatgtgactcgttctccctatgattcctattcttgaaatatgtctcctcagttagctttcttttgaaatctcccactacttgtcatatgcagcaaatgggaatcttacattgacttgagctatactggcatgggttctggatttaaaaaatagtccatttgaattactttaactaggacggatcgtctgaattcatatttgactgaaagagggactaatacaaactctgtggactcattttttaaaatcatctagaaagtcaagttagatccttaggctttgagattttttttgctgtttttctcctcctcagtgtttggaagtgtcattttaactcttctgaagaggtgtctgcttgaactcataatacgtgttcacagaaggcaattatagttgagtactgctgcttccattattctcctgaaattacatgattctttttctcataataccagaaaacacaagggattatttggattagacttacccttctcttacatttatcctgctcttgagtgtattagccacctttttttttatccctggtgagtttattctttaaccatcttggttgctaaacccgtcattaccctcctggaagtctttgcaaagctgaatctgttatgcgcttatgtcctctatttttctcttggagaaatataaagttgaaatcctctgatattttaaatttgtgacattctatgtacttaagactactggataatacaagtacaatattatgcattattcttaatattacattatcgccttctcctttcttttgagttcaaaggtcaactatttgacccttcattgtattatatttattttatttttgcatcaaaatttatgccattatttaggacactgtaaatcttacaatcttctttacttgtttatgtattaggtaatctaggtttacattactcatgcaagagcatttatgatataaaattattctttctttatcttctccattctacccaaatcttcaaataatctatatttattaaaatattattttatgtagtttttgttttgaagcacattcacgggtttactgttggccttattaatgtgctcaggatttttattttttatttcatgatttaatcttttttgtctttttatttatatttagttaaccctccttgagcttagtgtctgcttagtaaaggatgttggtttgattaaattccttggttatgtaatcagtgcttgatttttagtgatattttgcataatatttatattatttgtttaaaaataccagttgactaggcatagagtgactaagttctctagaagagtaggtatagtctaggactgaatctgaaacccagaggaggctattaaaatgtcagagttaaatctgtgtacaagagtaacaaatatttctacagaatggattatgattaaacttccaacaaagggggactctgtgacattttaaggcaatgtaagaatggtaaacattaaattaaaattcttctctatcctgaagactatataagaacatgggttcttatttcaattgataaaagtagagagttacacttttggaacaaatggaaacaaatttacaggcttttttttaaataattcaatttattttcattgaattattgatttaacaaatagttccttaaggaaaagaaaaatagaaaatagagcaatacgaaatcatgacaataaacttcaacaattttaaagtgtgtagcaagagaaaaaaaagccaggaataatagttaatggatgctgggcttcatacttaggtgatggaatgatctgtgcagcaccgcaccatggcacacgtttacccacgtaacaaacctgcacattctgcacatgtacccctgaacttaaaagttagaagaacaataaaaaataaagtgtgtggaaattgaagagacatctataaaactagggaaagaaacaacttgcaagctttaatttagtgttattattattatttttaaaagtagacactattggaaagcaaatctaaggatggcattgtatatgcagaacagaaatgtggcttagaacgttgttacttgaatcatcaattccaaatgcaatccacatacagtcatctgctgattattattgcaaggggaaacccaaataatacactgatattagtaaagaaattatcttgcttgtctctgaactgcatttaatatatcacactcttacgtttgccaattcttggttatccttgcttaactttgtgactggtccgccattattgcctgcagcaggctatcatcagcacagacccactgttgattgctaattgcaatttggagttttaagggagaacatatcaactccatcttttattcaaagagaattaaatgttgactttatagttagataatttcatgtaaatttaaattcagaatgtattttattagctgtaagctgttcagaaatcaaaattgtgatgtttttattttataatataatttcatatttatatatattttcaattctcttgtttaatcattatatatgatggtggttcttattatttacagagattaatccaacagcccctgtagaaaagccttatcttacaaatcaaccaggagacacccatcagaatgtggttgttactgaagcaggtaattacttcatgtgtctttaacttcatcaagaactgaactgtactttcaaacgctgcttcatgttgaccccagtgaaacttgtcttgcctggggaagtggttcactaagtatggtcctatggacatttacttttgaactaggttagaaaaaattatgctaagctagtatttgaatagaaaaacctgttttgttttcttcagagtggtactaaactaagtgatccacattaaaatttggatctggccaggcacaggggctcacacctgtaatcccaagaatttgggaggctgaggcaggtggatcacttgagcccaggagtttgagaccatcctgagcaacctggtgagaccccatctctgcaaaaaatacaaaaaactagcctggcgtggaggtacacacctgcagtcccagctactgggaagctgaggtgggagaatcacctgagtctgggaagtcgaggctgcagtgagcagtgatcatgcactacagtccagtttggtcaacaaagtgagaccctgtctcaaaaaagcaaacaacaacaacaacaacaacaacaacaaaaaaacaccaccaacaacaacaaaagaactttggatctacaagaaatttctctaacaacatgtaggcgtcatgatgcaaattggcacattcagtggagagcaaacaggggtgggctggtaaatgtttagggattggttggatccttaaattgcttgaagtcaaacaggagtgggaggaaacagcaaattatcgctcagataccctattgctcatgagtttgtcttctgttaacaaatgaagtgatgcgcagttaaatgtagataaaagctttatctacatctggtccactttgaccagaattattcagattagtcatgatgatgacttttaatttacaagctaaatgcatagttcttgaatttgctttttttgcatagacatgatattaaggcttagtgcttttcacttttcaggtgcctggttttaaaaccattcagaacatctaaacctaattacatatgtaactaacctgcacaatgtgcacatgtacactaaaacttaaagtatgataaaaaaaaaaaaaaagatcagtaggctgggcgcagtggctcacacctgtaatcccagcactttgggaggctgaggcaggtgggtcacctgaggtcaggagttcgagaccagcttggccaacatggcaaaaccctgtctctactaaaaaatacaaaaattagctgggcgtggtggcaggtccctgtaattccagctatttgggaggctgaggcaggagaatcactggaaactgggaggcagaggttacagtgagccaagattgcgccatgcactctggcctgggagacagagcaagactctgtccctccacaaaaaaaaaatattcagtaatcacattagaaatacttttttctcttttgaaattgagcagatgtttattaattttaagttgtatggaattacagtgtcacggttttttaattttactaagaatacctagcattatcaaatgtgatggaacaggattaaaaaatgattcattttagaatttaattaagatcaagtctttgtgccgctggagtctcgtgtctctgagtcgtgactgtatcatcagttaatatttatatatttcattttaatcccagtgacttgtatggaatcgtgacactaagcttattggctaggtaattacttacccaatatatttacaataatcttaataattattatttttaataataagtacttatttttgtaagtaatgattgagaaggagtaatgaaatgagttagctaaggttcttaatgaaagctagtccatgtctgaattgtagatttaataatagttttggaagtatggatatcaaattggaacagtttgatatcactacagatcagtacaattcaattttccgttcagtaaaattttgtttttaacttttaccaaaacatgaatacagtcatgtgccacttaacaatggggacatgttctgagaaatgcaccattaggcaattttgtcattgtgcgaacatcatagagtgtacttgaacctaggtcatatagcttactacacatctaggctgtttgatatggcctattacttctaggctacaaacccctgcaccatgttactatactgaatgctgtagacaactgtaacataatggaatttgtatatcaaaacctatctaaacatagaaatctataaaataggatatcaaatataaaagatggtatacctatgtagggcagctccattataatcttatgggaccactgtcacatatgtgatgcatcgttgactgaaatgtcactatgtggtgcatgactgtatattatttcattagatttttcaatattttgagaagaactttggggtcaatttattgaaaattctatttcacctgaattttttgaaacattcttacatatttttgctttagaattcttcctcaactatcttttcacatgaagactgttttattttgtaggtataattcccaatctaatttatgttgttataccaacaatacccctgctcttactgatactggttgcttttggaacctgttgtttccagatgctgcataaaaggtaaataactcatatatgtagagacaatttgaaaaactttaaataggttttcagaaatgttttaaaactattagcataaagttaattatattttaattttccttaagaaatcctatacatacaatctaataagatatacattgaggatagaattaatgtaatatattatttaatccttacaggacttattaagcagttacccttctgtttgtatttctcagttgagaagatggtgtcttagatgggttacctagtctgccttgggtaccatagttagtgtccacggtgaatctgaaatttggatgtttgtaaacttccaacatatgcactatattatactgttttttgtttatgaagtataagaattaatgctaaacttttcaatctagacatcaagctatatgtaagacttgatatttgtaggttcattttgtattacttttcaaaattcaagtcacaggtttctgttttatttcaaaaagatcttttaagaacaggaaataaaatacagcggttcaaacaggccactttttggcaggtatcttgaaataaaatcctatattttaccagcaagatttctgggggaatattatgactttttatctgctttcctgtacccttgggttagagaagtttttccatgtgtgccaattttttaataaaaatgaaacaaaattcaatataatgaaaatgtatttcattgtcaaataaaaaatgaaatataaatatgtatcaaaaggaaaaaaggaaaagctattctgtttatataagagcatgtttgctagaataaactagacatctttgtctgcatggtttaaataagaactgatcaaggggatgcctccatcaggaaggacctgcaaacaaattcattttcctcttttgaccttacttcatcttcttctttttctgaaataaaccctaccattaagcaacaaaagacccagaaaaaaattaagtaattctgaaatgaaatactaattctacacaaaagccacattaataacctttttttttttttttaccatttagaccacttttgtgctttttataaactttcttggcttattttccatacatgttagatgactgtagaataaagttgtgctgatcttacttatttggatgaaaatctacaaaccatacaatttggacataatattttattagtaaccaaaacagctaaatctaagtgaattaagtaatattttaaaagggtaatggtcaggtgtgtttagaaatagttcttttttctctttgagggaattctgcaatgtctggtagatggaggaggggatggggagacgcctgtgaggactgaggcagatgctgggaactggggctgggatggtcagggagcaagtaagtgcacaacacagtgaaccgggacaaacacttttggtccaggcaggagattatcttgaggaaaccagcccaaagaaatctacttttgacagggcatccagtagagaatgacttgggtggatcatctgaggtcgggagtttgataccaccctgactaacatggcaaaaccccatctctactaaaaatacaaaaaatagccaggcgtggtggcgggcgccgataatcccagctacttgggaggctgaggcaggagaattgcttgaaccggggaggcggaggttgcagtgagccgagatcaggccactgtactccagcctgggcgacagagtgagggtctgtctcaaaaaaaaaaaaaaaaaaaaaaagagagagagaatgacttggataaactcaggaacagggaacttctgcaggtgcctgaaaagttatcgtgttgtggaaagacagaagatagcagaaccctaggcacaggctggaaatgtgggccagaattccaaatgtgacaagggtgaagttgtatctcaaatctggaggaactcagaaactgttatgttaccaaagcatgaatctgctattgaaccacattggtttcagagactgaggcaccagtaagcttccagaaatcaagtgacttaggtgcagagccggagaagcgatgggaggaggggaataggcacatccatacacatagtataatagcattgttttgatgatttgacattaaattcagcatccattagtgacaggggactcaaggagcaaaatgatttccaaaataattgatcaaagaaaataaaggtatttattggtgaataaaacggaaatgtttaatatagtgtcaggcacatgtttgtaggtgtggaaccaacccaaatgcccatcaatcaatgcgtggataaagaatctgtggtatatatatgtatatatatatatacacacacacacacatatatgtatgtgtatatatatatgtgtgtatatatatatgtgtatatatatgtgtatatatatatgtgtgtgtatatatatacacacacacacacacacacacatatatatatatgatggaatactactcatccatacaaaggagtgaattaacggcattcacagcgacctgggtaatactggagactgttattctaagtgaagtaatacaggaatgaaaaactaagcatcgtacattctcactcacaagtgggagctaagctatgatgatgcaaaggcatcagaatgacacagtggactttggggactcagagggaaagagtaggaagggggtgagggataaaagaatacaaattgggtacagtgtatactactcaagtgatgggtgcaccaaaatttcacaaatcaccactaaagaacttactcatgtaaccaaacaccacccgttcccccataacctatggaaataaaaaattaaaataacaacagcaacaacaaaaatgaactctaaattaggaaatgtcaaacaggaaaagatatgttttgttttctctatcattcacaagaactgtttgccatcttcacatatttgaataatctagaagtttttggaagaatgggaaaatatactgctgagagggggagtctttcataaataactgtctgagatatctccctttggacgtagacatgcttagtttaataagaaattttaggcactaaacattttttcttatgtttttcagtaaaggaagaacaaaaactagtccaaaccagtctacactgtggatttcaaagagtaccagaaaagaaagtggcatggaagtataataactcattgacttggttccagaattttgtaattctggatctgtataaggaatggcatcagaacaatagcttggaatggcttgaaatcacaaaggatctgcaagatgaactgtaagctcccccttgaggcaaatattaaagtaatttttatatgtctattatttcatttaaagaatatgctgtgctaataatggagtgagacatgcttattttgctaaaggatgcacccaaacttcaaacttcaagcaaatgaaatggacaatgcagataaagttgttatcaacacgtcgggagtatgtgtgttagaagcaattccttttatttctttcacctttcataagttgttatctagtcaatgtaatgtatattgtattgaaatttacagtgtgcaaaagtattttacctttgcataagtgtttgataaaaatgaactgttctaatatttatttttatggcatctcatttttcaatacatgctcttttgattaaagaaacttattactgttgtcaactgaattcacacacacacaaatatagtaccatagaaaaagtttgttttctcgaaataattcatctttcagcttctctgcttttggtcaatgtctaggaaatctcttcagaaataagaagctatttcattaagtgtgatataaacctcctcaaacattttacttagaggcaaggattgtctaatttcaattgtgcaagacatgtgccttataattatttttagcttaaaattaaacagattttgtaataatgtaactttgttaataggtgcataaacactaatgcagtcaatttgaacaaaagaagtgacatacacaatataaatcatatgtcttcacacgttgcctatataatgagaagcagctctctgagggttctgaaatcaatgtggtccctctcttgcccactaaacaaagatggttgttcggggtttgggattgacactggaggcagatagttgcaaagttagtctaaggtttccctagctgtatttagcctctgactatattagtatacaaagaggtcatgtggttgagaccaggtgaatagtcactatcagtgtggagacaagcacagcacacagacattttaggaaggaaaggaactacgaaatcgtgtgaaaatgggttggaacccatcagtgatcgcatattcattgatgagggtttgcttgagatagaaaatggtggctcctttctgtcttatctcctagtttcttcaatgcttacgccttgttcttctcaagagaaagttgtaactctctggtcttcatatgtccctgtgctccttttaaccaaataaagagttcttgtttctgaagaatgatgactagtcctgtctaaacctcttttatgtgaaacaagtacagatatgtttgcatcgacgtataaagttgaaaacaaattactctttaagtaagtgtggtaataatggaaggcgtgattatgtctaatgtttttcctgtcaattcttttcagttaaataatattttcctcaacacagttcacaactagcattggttggcaaagctaggaggcaaaagagaaatcaatgggcattgcccattttcagctgctcagagactgagagaatgagcagctgcatttgaagctgagatctgccaacatgcagcactcctctttcttttcttggctacctatatcatctatcatctttctgggtagaactggagaccagttgctgggacgtaacctttttcctccaaactactatcatgtagttctgcctctagtgtgaacatactggaggaaaactgggtgttcccccttgtctttgccaccatggactataacagctgcaaggcaaaagcagcaaataatcaatggagaaatgcctggcttttgcctttggtctttatctaggtctgggtaactcttctggtatcaccaactaaacctataagctactggaggtggaaaatgaacttctcttttattagaaaatggtagtaatcctagcttcttaacagtttcctaaaattttagctaacctttgggaaatgaaaaatacatggtgtatctgttgcgttagcatttttagaatatatttttgctatatgttttgaaatgcagaagaaatgtggaacaatcttcaggtactaaaaaacaaataataccctgctggtcagtctatctttcccaactgttgttagaatcagaccattggaaaggtattaaaaggaatcgtgtgtttagtggtgatacgatttggctgtttccccacccacatctcaccttgaattgtaataatccccatgtgtcaagggtggggccaggtggagataattgaatcatgggggtggtttcccccatactgttctgatggtagtggataaggaaagtggaaaggaaatggaagaagttctcctgcatacgctctcttgcctgtctccatgtaagacatgcctttgctcctcctttgccttccaccatgattgtgaggcctctccagctatgtggaactgtgagttcattaaatgatgtctttctttcctttataaattacccagtcttgggtatgtctttattagcagtaagaaaatggactaaaacacgtggctcctaatttttgtccaaagaatgaattctacaatttcttaacaggaatttgcattcgtccatcatctggccacaccttcttcatataaaacattttttcccctttatctgactgtttcccagagagagagtcttttggtatgacaacacattattctctatttaactgacccccacctgcacagtagatcctcaatatcctcttcaatgcctctgtaataattattctttccaggtgtagttcaaatctcctttattccataaggccaagccatacaattggtcccttccttcaattccttttaaccttactctctctctcttctattaaataattgtcccatgcaagcatgtgtgtgaaggtgcgtatgtgtgtgtgttttttattaactatgaattttttctccccagatacatcaaaagattctgtgtggtgagctaaattgaagtcagcacttattctggaaatgatccaagggattaaacaagtgaagcaaattcatttattacacatatttgaccttctcatgggtgattcagctgtgtctaaataagttttcatatattagaaatatccactgtaacacacataaaccaagaccaggatttgcaataggtgcatttctttggtatgtctgattattttcttgagacttaaaaatacttgcttgaaataaataggtaaaatttatctaatatacaatgactatatcagttaatttatcttttatttaattaacttatttaagaggaacgtaaaatcaatttagtccaggcctgtgacataagcttacaataaatagtttctattggttgggaaaatactaaggttatgcatatgttgaaaattttgatagaaaagacagagaaacaattgagtttctgctaatagcagcaaactaaactggaactagaaaatttatggcagtttatttccaacagtgacatactttgggaaaaacaatttattttctttcttttttaaattctgctcaaatttcttaagtgtatggtatatgctttaaaataacatccctttaaacaacagtaagtaataaaaataatcattaagaattttaaaaatgagatctgtgaagaaatacctgttcacaatgaaatacaaatgtatttaatggtattttaaagttattctgtattgctatggtgaattttattatttttaaaattttgtttccctggccccctagcatttcattgacataggtaagaataaaaacctttggtaactttttaaaatttttgtacgaaacacttaatttccatgctttctagagtagaatgggaaaataatgcgactttcctgtttagtttaagaaatgcgctaatgtagaaaactttgtatccattcggtaaaccttgagaccctggcatacactccggggcgattaggcagggcacacttgtatccaaatgaggtcacaccagcaaggaaccacctgttgttttcttggcacattaatggtcctcctgaatccccctaaagagtgaattgcaaaacaaaattgtagatatgtggtcaattgatcgaaacatataaaattatttgtatcaaataaattaaaaaataaaaattaattaaaaaatatgatttaattgcaagtcatctgtatatattctcactttcactctaagtcaggaatgagaacctcagtaaggagacagagaaactataacaactaagacatcatttataatttttacagtgcacctttttagtaaaagtttctccactttaattaggcattttggtggctactaagaagttctttaaagcacaactatgaaaagcatcccaaacaaaatatttattaacagccaatcactttatttaaggagatctgctgtaagtgccacaaaggacactatggaaaagacaaattatttcacaatatactttttggaaaaattaggaactcacacataaagtagattttagttctcttgggtagtattatctttttggggctcaacaaacaccatccgatttgaaaaacatttcaactgaaataaggaagtctgtgatataatttttagtgataattgctcatgttttcatctgagatttcaaactaagaaatatttttaatttttatgaatattaatcacagcagatcctagtaaagtaaatttcatagattttatttgcacgtgattcctgtgtaatgcaatgataatacaaacatataatatcattatttaatgacataaaattgacaagtatttttcctgtattaattgggcaaatctttttgattaatttgttttttatatttatgaagacatttaaagttttatgtgttttgaaatcactggtataatagaatatttcaatcccagctcgatgctagaaattatcctgagagactttttgtctgatcctttttatcatctttgggccctatatttaaagaaaaaaatgtaatctatcaatgcacccttttttcccctccatacacaggaacataaattgcactggcgaccataggttaccaacattctagtgtaacaaatgtgtgcaaggtgtttgaaagcagggactgtgatttctatttctgcatcccaaacccttaatctgtaattataggttctgaaatatttatggaacagtttatattcaaggatcaaagtacattttatatgacttggaaattattaaaaataaacttcagctgtttggatatttttaaaaggagtaacttgtttttttacatatcttctaaaacaatttaattttttaatagacaagaggatccagacagaataaggattttacccagaacatactgggtcggttgcagttactcaaggatcctgcggcagacttgttgcctatcggctgggtggtctacctgattgggagacctcagtctgtttccattacttcttgtcatctaactataacacatcagtttagttatgtaacttctccttaccttaattttcttttcttttcttttttttttacattttactttaaggtctgggatacacatccagaatgtgcaggtttgttacataggtatacgtgtgccatggtgctttgctgaacctattgacccgccctctaagttccttcccctcacctcctagtccccaacaggccctggtgtgtgttgttccctgtcctgtgtccatgtgttctcattgttcaactcccactcatgagtgagaacatgcagtgtttggttttctgttcctgtgttagtctgctgaggatgatggcttccagcttcatccatgtccctgcaaatgacgtgatctcattcccttttatggctgcatagtatcccatggtgtatatgtgccacattttctttattcagtctatcattgatgatgggcatttgggttggttccaagtctttgctattgtaaatagtgctgcaataaatacacgtgtgcatatgtctttacagtacaatgatttaatcccagtaaagggattgctgggtcaaatggtatttctggttctatatccttgaggaattgccacgctgtcttccacaatggttgaactaatttacattcccaccaacactgtaaaagtgttcctagttcttcacaaccttgccagcatctattgtttcttgactttttaataatcgccattctgactggcatgagatggtatctcattgtggttttgatttgcatttctctaatgatcagtgatgttgagtttttttttcacatttgttgcctttccttaattttctgatttgttcagtgaagatattaatatttcattcttccactgtcttggagatatatgagtacttcaaaaatatgcatgggacccggtgcggtggctcacacctgtgatcacagcactttgggaggccgagacgggtggatcacctgagatcaggagttcgagatcagcctggccaacatggtgaaacccggtctctactaaaaatacaaaaaattagccaggtgtggtgatgggtgcctgtaatcccagctactcgggaggctgaggcaggagaatcacttgaatccggcaggtggaggttgcagtgagtggagatcatgccactgcactccagcctgggcaataagagcaaaactctgactcaaaaataaataaataaataataaataaatacatacgtaaataaatatttttaaaaatatgcatgaatttacagaacataaagtattaaccttaaatttatgtttctagtgagatgctatatttataagtaaacataaaaatcagtaccttctttgagtgtctgagtgcaagggttggtgaccatttttgttgagaacattacttctcatactttagtgtgcatcagaatctcctggaagatgtgacaaacacacatagctggccccaccctcatagtttctgattcagcagatatgtgatgagccctgataatttgcatttctagcaggttctcaggtggtgctgctggactggaggccacgcattgaaagccattggaatagaatatggcttggaatggtaggtagagtgtcagtcactaaattttaggtagagaagatattcttcagccattggtgttgccttgaaatccaaactactaccactaaaaggcaagcctttggtaagtcagaagttgtggatgactaataaggcacattctttgccactgtaaggctaaaaaatgatgcttcaaagaacttaaataatgtatcagtaataacgtgttcacaattttaaagaatgcattcttatttaatcagttaatcctgttataaaacatagtattaaagttgaacaaagaaaatcatgtgacagtctagtgtattaattactcaattatgataacattttattatacaaggtattaccttatgtgggagacttcttgcttaccaaggaataacatgcttagactgtgtagaatcagagctagctataagatttcagagacctggcatgagttaatgacttaatgtaaccctaaaatcaatagcatcagccgtcatattttctgcctagtgcgtgaggtgtctgccacacaatccccattagctgtaattgaagttgtccagctgatttcccttctgcgcaagaattctatagatctccttctaagtggcaatatatcttacctttagcacacttttcattttaaaaaagaagtataagacccgaagataaattttaaacaagaaaaaagccatcctatttgtcttgaatttgcaagcatttatcaaagcagaataaatgtaaaactaagctggaagtttaacacaactgaagatattgatttaactagaggacttacatacagatgatctgaataagcgtcaatttagatggctcgtcatgtattgatagtatgacatatatgtgttaatatataaaataagttgctacactttaacacagtgaaaccattttcctatgacataaactgctatttcttcatttagtaattattcgtttggtcagtaatgctagcaggtttaatccagcagacattaaagcattgatatgttattaattttcaaatatagaaaatatgccagaaaatttatttactaagcttcataataaaaactgttaacatttttgagtaattgctcgatgccttacatgggttatctcatttaaacctctccataaaccctaagtcacttgcccaaagtctcaccaataagtgttaaagccaggatcaaacaagagtagtctgaacatagaatccatgctcttcatgactaccccatgctgtacctaaaaattaattacaattctaaaatctagcagaacttccctttttatttattgtgtgtacttggatttcatggcgctaataggaacattactcttaggtggcaagatatttcagtgaagttactacgtgggtaagagttttttcctaatgtcacacaggtcaagagccattgacacttcaaatttattgcaatattgacattagcactacagcaagttcaagttactacatttctaatatacagtgtaaacgataatataaaagccagagccagggttatgccagtctattaagttatttacttcccctttggttagctgtaaattgactctaacgaggctatgcaggttttcatcaagaaattacttcaggttactgcacgcctggatgatattctaaattcagggttgaaatttagaggcccacagactaaactggccctcaagccctgtttttgtttgtttgtttgttttaagtttgcatggggtttaaaataattggaaatttgaaaagaaactgcttttagataaggtgcacactttctggctcaacccaggtccactgctcattttagctggctgcctcacacattcaagtattatgtctagtctccaaaagcatcgatttgtaacctattttcttaaaaaataatttttgtttccagtgctcaggtctacccaagaggattacgcaaataggcaaaaagtaacagttttgtaaaagagaaatgaaagaagcttatttctttactccctaattattgttaagcaatgaaataactataacaccagtgctttctgaaaaggtacagtgagcagttttacatctttacctgacaagaatctattcctccttcttcatagcctgcacatatcatattttcagtaatgttatattctggcatctgctgttggcatctctcatttgatagaagaggaacatcagcttcttgcaatatgtttgcagtagtacctgctcaaaatggagaatgcagccagccagtcagaagtgatcaacatgcatccttgaatgaactaccatcagtcctatttattccaacatttcactctcattatcaagtactgtgtatatataatggaactaaatactaaaccttgcacactaaagcacataataaagcccatctgtggattgtgccaaatggataacaggaaagctcttcttttttaccgaagggctagtaggagcgatggattagactagatggtctttgggcatcttctgtgattttaaacagttacaggattgctcatgggggaaaacgctccccaacacaaagtgtttcattcatggaaattagcaacagctcagaaatccagaagtgcttttcatttggcacctgaggaggtgctcgcttctgtataatagcattcagcttctttgtggtgctatgtgagtgagcaggtgcacatcgagcagaggacaaagctcagatgaactatgccctggtctaggggcaatcagcttgtcatgcatacccaggtgaagagaaaggaggcatttaaaaaaataaagcagagtgtacttacctgctttttacaaaatgattcatccactagaagtacgaatctctgctgaaatactaatcccaagagagatgtgaaacaagcaggtgtctagtgccccagaaaaggtacatgataagcactttctaataattagcatttctattttgttcctcaagagaggcagaacgttgaagagaagttagtacatttgacagccattgatgctgaaaaaatttatgtgacctcatttctagctaaatttaattcatgcactaaaaagatgaaggaagcaaaaaaagtgtgttcgtgcacacgtgcacgtgtgtgtgtagttaaatgcaaaacagatatatatgactcagtagtgcattggtaaatgtatatcaattttctctccagaaaaatgaaagccccatgggccttcctctcattttactgatgtaaacacttccacaatgatcaatttcaaggtaccagcatggcagtgaacatggagtaaacattactagataacttttcaagtttgacaatggactataagaaaatgaattgcagagattaaaatggaggagaaaatttggcatctcactgttatccattctatgaggatcaaggatggcttggcagactttaattttacaataaaaaccaaggccacttctgctgcttgtcaatgatttaaaatttgtttggtagatgataaaactgtttggtaaaggaacatttgagcagtgtctgtttactgattgccttgatttaaccaactagtatcacctcatttcttcctagtgaacaatatgttcatggttttcctagctaatcaattagtataatatactcaaaagattgaaaactgggattctttttttttttttttttttttgagacgaagcctagctcttgtcctccaggctggagtgcaatggcgcaatctcggctcactgcaacctccgcctcctgggttcaagtgattctcctgcctcagcctcccgagtagcctgggattacaggtgtgtaccaccacgcctggctaattttttttttgtattttaagtagagacggggtttcaccatgttggccaggctggtctcaaactcctgacctcaggtgatctgcccggctcagcctcccaaagtgttgggtttacaggcatgagccaccgcacccggccagaaaactgggattttatgaaattaagtagatggaagtcataaagcaaagttcataaactacgtgaaacttaccatcactcaagaaatatttaaacatgatctagctgtttattcctaaatgaaattgatctcagatacagtttatttcctggctccataccactcttagagactttcttaagttaatcagacatatatctttagtaacaataagtaaacgtaagtcacatttactcagcttttaaaaaaaatccaaaaacaaaaaaaacttcctatgaaataaagagtttcaaattttgttattggttaatttgtttttgaagagcctacactgtggtcataaaatgtcttttagcttgaagtctgaaaagagaaaatatctatctaggaatcatttttactgtttaaatttgaagtttaataaatcataatatttttcaagagggagaaatatatgaatatacagtctttgacttcaatatacttgatggacagcagacatgaggcattttcagcaatacagtgtcattgctgtgaagaacttttgtaggagttatcagaaaagcatttgacttagaactttgtgctttctcttataataggtaacgacattttaaatgtgagtactttgattctgagaccctctacctttccacaagattttctgcattttcatcttaaatacatttaggacttttaaacatcatggctataatttgttgtgactgcagggatcaggttctcttatcagactacagagccttttctggtgctttattatttatgagtggttaaaactctgtcccagctagggcactcctattagaaattccacagccaatgagccttgtggttacatttagagggtatgaagtacgagaatacttttcaaaaaaaagtatgattatttttaatatgtatgatttctgtgtttggaaaacatgcagttgatgctgggggtgaatggtgtatcaactgatggatacaatgtaagattcatgtcaaatctgagccctcttgtcagtaagcagaattagcatgttcaagttacaagagattccattctcattttaagaaaatgttgagtgtgaggccttcacattataaataaagatagttttattagtttggaaaatgtgacaggtaataatttggcttttgatgagactttatcatgtgctttacaaaaataaatttttgtaaccctagtttatattcattttaatgaggcttttaagtttatcagagtgtttataatactaaaactagatattgaggttggggacacttgaattccccgtcaaaagaatatagttttataatatcttctatgcaatctgaagaaatttttaaaaactctacaaatatataggctgggcgcggtggctcacgactataatcccagcactttgggaggctaaggcaggcggatcacgaggtcaggagatcgagaccatcctgaccaacatggtgaaaccccgtttctactaaaaatacaaaaaaaattagccaggcatggtggcaggcgcctgtggtcccagctactttgggaggctgagacaggagaatggcgtgaacccgggaggtggagtttgcagtgtgtcaagatggcgccactgcactccagcccgggccacattgcgagactccgtctcaaaaacaaacaaacaaaatcctacaaatataaaaactctgcaagtatatctttgaaagctctacagatacacaactctaaatatatatatgtacatgcttgacggtacttttaggagatattgaaaaaactgttatataagaattgcaaagatgttgaaagcattcacaggatattatgacagtctgtttttcaccagtaaggtttttttttttttttttttttttgagtctgataatttaccttgatatacaaccgtcccccaaccagcaatagaacaatttcttcctggaggaaaaacttgattttcttccggtaaacaaataggttgtatgtaatctggaaaaacaagcaaacagcaaaacgaacaaacgaagaaaaagaaagaacagatttacaagcatttctaacaagttttaaaaatcaataacagttaatctaaaaaacatgtatttttttttttaatcctacctgtaaaaattttagacatcggtcttaggggaaataggcatttcagagcagcactttttgacaatagatcggctaccactggtggccctttagggtcttttactagtctcctcgttactcttttttttttttttttttttttttttttttttgagacggagtctcactcggtcgcccaggctggagtgcagtggtgcgatctcagctcactgcaagctccacctcccaggttcacgccattctcctgcctcagcttcccgagtagctgggactacaggcgcccgccaccacgcctggctaatttttttgtatttttttttttttagtagagatggcgtttcactgtgttagccaggatggtctcgatttcctgacctcgtgatctgcccacctcggcctcccaaagtgctgggattacaggtgtgagccaccgcacccggccctcatttctcttttatagtgtaaaaaatgtcttagttctggaggtaatcatttatattttatttttaaataaaattatggtgctcaatagaaagtggtgccagttctctgaaaattatggtaaggatgattttcagcatcaattaatagaaatttgggcaaatgttctgagacttttttattttccccaattatcaccatgttaaaaaagcttttaggagattgttttacagggcaattatggaagcattgacattggtcactgacttttaaagcccttcttgcatcaatttacaagccaactggcacccttaagcacccactgcatgtaagacctagggcagacacaaaaatgaataagacacagtgcttatccttaaggacagggatatacaactaaccgtagcaatagtctgcttttgataagtgctgtaatgcatgtataaatcaaaccccatgaaaacacagagatggcagcactttctcctaaccgggcactgaaaaagacttaggaataaaagtcagaattgagcagagcccttcatgataaaattcactttatcaggggatttcttgcacattttccaggcatttggaggaagtccttcatttgtcactcagataatattatcgaatctccattaaaaacttcatcctatgaaggccgggcacggtggctcacgcctgtaatcccagcactttgggagggcaaggtgggtggatcacaaggtcaagagatcgagatcatcctggccaacatggtgaaaccccatctctactaaaaatacaagaaaaaaaattagctgggcatcatggcatgcacccgtagtctacctgggaggctgagacaggagaattgcttgaacctgggaggcagaggttgcagcgagccaagactgtgccactgcactccagcctgggcaacagagcgagactccgtctcaaaaaaaaaaaaaaaaaaaacaacaaaacaacaaaaaaccaaacttccttctatgaataacttaattcttgctcactttccccacagaacatgtgttcttctctcagtttatgtcttactctgctttttggtagatgaacctacctttcttttacatgaaaaatagagagggcatgcataataacatcatctatttatctgagcttctcctttgagtttactgttatacagggctcagagagttttattctactggttctttctggaaagttgaatttaaacatcctgatgaaagaaatttaatatatttctctctactccctaatcccatttaagttccaatgatttatgtaacaaattatctagcttttatgaattaatgcattgacattgataatatttgaaatctagttttgaattaattttggcagataagatgactaagagtgattttttttttttacctgtgtaattcactttaaattccagatgcatcatggcaatgtcgttgtcctttcttcgcctattgtaatgagggtttatgacaatttcatctattaatcgagggactgtttgaggagaggtcagatttgatttcatatgcaggcctaggattgctgtccacttggatggctctaagtttctcctgaaaattgtaatgaagaaatatgagacactctccatccaaagcagttcctttctagaagatcttcatcatgacatttcagaatatgtttctatcctgaaatgttctttaatttctctgaagaatcatcctttaaaaatattctcaaatctttatttttctgatcacaacataaagaaaaccctaattagtgctaatctctctgtttcactcctcttaagttatatgctgagctctagttctagattgtggttctcaactgtggttgtacattgcaatctcgtgaggtgcttttaaataatgctgacacctacttcccctcctcccccgattctaatgtactgggtctggaatagtccaccagacaatttaaaaaatacttctaaaattaaatctccaaatttgtgctactatatataatatatggctaggttggagaacctctgccttaggtcacatttcactgtggaaattgtgtccctgttaagggctttttcagacaactgtagctagcaactgtagtataatggaaggaagttcagatgcatttcccatttagagagtcattgaattcacatatagttaaagtaaacaagccaggcgcggtggctcacgcctgtaatcccagcactttgggaggccgaggcgggcggatcacaaggtcaggggatcgagaccatcttggttaacacggtgaaaccccgtctctactaaaaatacaaaaaatcagccgggcgtggtggtgggcgcctgtagtcccagctacttcggggggcagaggcaggagaatggcgtgaacccggggggcggagcttgcagtgagccgagattgcgccactgcactccagcctgggagacaaagcaagactccgcctcaaaaaaaaaaaaaaaaaaaaaaaaaaaagtaaacagtatgccttattataatttttataatctaacatataaacttgaataatctccatatacaatgttggccatctataataattggtaaaggataacacttgtgttgtagaacagattaaattgggtagtatattataatttgaaagtgtgcaaggacttttaaatgtgctattggcctgcgatttcttcacacaaaggaattatcagctggaattaagccagttaagccatattcacaatgaaggtaaaattcaatggttgcaatcctaggcagagctattgattcaattcttaacagtcgcaaatgcctcgtttaatgtggtatttaaatattaaagtccaagtcacttccagatgtataaagggcatgaagttacttacatctatctatcactttgttttatttaccaaattactatgtttggtcaggtagcagtcatcagtaaagccagtgagcgtccaagcattcagtaaagcatccactgacaaccacattgcattagaacttgaagaaatacacctaagtgctctgtagcaacaaaatactacttggtgccaagtgcaataccgagaacttttgtatctcttcatttaatcctcatcataattttacaatgggaacaaactaggcgctgattatctaaatggtaggaggtgactttaattggagctgtctgactttagagcctgcacttaacaccagtgactggggtgcctcatacagctctgagtggggtgccatgggagggattgagaactagaaggaaggactggagatgtggggggcaagagggagagataagctctgctgttgctttccctgctcccacataggggaagttatctctgctcctagtggttggtggcagctccttaagtggcttagagactgggccaggaggtcattatggtgctgtacaggcttgacaagaggtcttcgtgctttctcttctccaggtcagaggaatctgtacttcagccatgcttggcatcttgataatttcagacagcaccccacttccactgtaccctgggattcccgtgtctactttagcctatgtagggagagtgaacagagccaaatctcttccctggtgttctgtttctgaacttctttctctatcacatgttaagtatatttcctaaagctcaactggtcagttttcacttgagtagcctgcctgttaagactgacaggtaacaagtagttactttattttaaaaattgtatgattttttttttactcaacatttacctcacacattcactcaatatttacaaaaaattaatcttacaattactataccgtatgttttgtgtttggcattttattaaatttatttatacatcatattctctgttatattcatataaccaatgtattgtaatagtatttataatttatagtgtatgtatataaattatctatataaatattacctatattaatgaactattaatatttgctcacagtgtatgagatcattatatataagttggagttaacagaggacatgtcattattaaaaattataggattgtctcctcaggtgttttatacatattttatcttcagaatttttcatatagaagttcagagaggtgcatgcagtttatttgatatagatttaaataaatgttaaattaaggtatttcagagaaagagcatctaaactcccaaattcttctttgtaaatactatactttatctgagaactaatcaacataatcactgatatgagagagcttgtaggtaacatagtttagtaatcatcacttcctttcattattttaaggacttgagtagaaaaccaatatatgaaccaggaacgtgcagattaaatatacgtgcttcaagctactcatctaatttaatacaatttacaacaatattaatctgacacattcttgataatttccaaaattgtttattgtgccacatagaaaatagcctctctttcatgtttttattacttcagtatctatgagcagcaccatggataggaaaaattccgccgccatgtatcatttacatctttccttcaaagagaaaggctgctccacaaacctttctgtcatgcacttaacttccccaccacaaaaccaacactagcacaagcaccaccagtactactccatctggcagtaattttagagcttttcctcggtggaaaatgactggagaatacagagcttacagccaatagttcttaagttctagagccacttgaggaagtttctaaaactttagatttctagtttccatttccagaaattctaatttggaaagttggagtggcactcaacaatctgtactttgtaatcactgttgggatactgagcaatgcagaaaacttcctagcttttttatatacccaaatctgaggggcaggtgaagacagccttcagaaaaatcattttagatgaagagatgggactttttatgtttttaaaatctggtctcaaagcatctcttttctagtaaaggaaggaagagctatagcgctgaagatagatgggcataggagaaggtgagaaccacctggaataggaaatccccaatccggtggaggataaagatcgcaaagatagggcatcttcagatagaagttggctgaatttactttcggaggccgaggcaggtggatcacctgaggtcaggagttcgagaccgtcctggccaacatggtgaaaccccgtctctactaaaaatacaaaaattagccaggcgtggtggtgcacgcctgtaatcccagctactcaggaggctggggcaggagaattgcttgaacccgggaggcagaggttccagggagctgaatttgtgccattgcactccagcctgggtgacaagagcaaaactctgcccaaaaaaaaaaaagagaaaaaaaagaagttggctgaatttttgctgcatttcaccatctgtcctgcacaagcaagacatttatcatagtagcaagagaaagagaagcacagcaggttggagagggcagaaaaacatacactcctggtctctgtaaccccaaagatgcttctttgaaaaaaagatgcttttttcccatttcctgagatgcagaagcagcaccagataagatgaactagtggtacctcagatatatgtggcaatgtgctgatgtgaaaataacttcaccactctaggcatcaggatgtccatttgtaagtgggactttcaatgcagtagaaagcaaatatggtaagacagctatgatagagcatcacaacaggctgaagggaaaataaaatcaatgggaatccaaaactgtaaattaaaacctttttcctgttttactattactaaaggtggcacaacagcaacctcaacaactttgcaccatgccaacactgatgtttacacccagcacagcatttttggtctctatttttattctcctctgaatgtaatgaggattcctagatggctagccaattcgaatatttaaggcaactgaaagttagaatgtttctgaaacatagtgttgttgccagagagtacgaaagttttcaagaatatcgggcaattctgaaagtacaaagaagccagattaaatgaaataacactggcgaagttttagcaaggtgactctcatataatgatcattatcattaccacagttaaaagaaaagagttgtttatgaaaggccatgtgtctgcaatgaaactcaaaagagaaaagttaacaggtgcaaaaggtagttttattataaaaggagggtaggcaacaagaatatgtttaatttttcttccttttcatgagtaaggacaagagtttcatatatgtgaatatttttatttaattttaagtagaaatctgtttttaaaatatgggtatatgcttatttgtgtaagtgtaagaaacagaagtaagtacagcaaaccagaaataggccaaacactcctgagcataattttacttggtagattattcctgaaacttaaggaatcatctttgaactcttttcctcacttgacttccaggattcaccatgcacttgtgattttcctttcatttcactctccgttcctcctcagtctttttttctcccccaggtcttttttgttcatcttaaactctaaattttagaatatcccaggggtctgccttcggccttctcttttatatctacactggcctcatacataatcttaaccaagtcattattttaaatacctacaatatactgaaaacttctaaatttgtattttaattcttgacttcttccatacagtctagatttgtatgtccataggctgacatcattggctgataccaacttggatgtctaataggcagtcccaagcttaatatataaaaatcagaactctcactctctttccaatctgatttcttcctgttttcctcatctcagtaaatgatatcaacactcactccattctcttttccttactccatatctgtgatcattaataaatgcagatgactctaaccatcagaacttactaaaaagatccagccacttcctcagcttcttcagctatggtcctaactggtgtccctgatttcacgtttgctcctcccagcagtcccatcttcacacattagcctgattggataaggtcactctttggtcctccacatggtccctcatcctatttacctatttagcctcctgagacctctccagggctcgatccatagttccagtctcgtcactgccgctctgccaatccccttctgggcaacagcagcagggctttttgaggtgtctggagtaagtctacctcacttctaccccagagcatcagagtttgctgttaccttcaaagaaatttgtgtaacattctccttcatttctttagattttccttccattttcaattggtctgtgacactttctccaaccactgtatcgaaaacaaccttcttgctcttatcatattttctgttcatactacttttctttactgcatgtatcactgctaaagtatttatttaaatgtttttcagccttaacatgtcatataaaccttatcagaggaaagattttgttggtctgtacagcactatcatctccaaacttagaaaactacttagcacaggataagtgctcagcaaatgtcatctgattgaatggatatataaaaaacagtaagcaatccaagagcaggaaggaatgaatattaccagtggttcctcataacagccaggtaacgggcagagttgcgtatcaatccacataatttcactctctgttcttcctcagtcttctcccaccccacccagctcttttttctttttaatgtttagagtctcaaactctaaatattaaaatattccttctttgtgtaacaagtggttatgcaaaataactaagaaaaaaggtggctcaacaatgtgatccaagatgatgaattaattatcaaagtagaggtaacttgagagatacgatagaaacttttaggaaatgaaatttctgagtgcactaataattataatgagatacatgccaaagagacatatgttattaaatagtggtaatagaatggtgtcaaggaaatggattgcacgatataggtcaagagagacttacaggaaacacaattttacagggaaacacaaggttggaagttgatataacctctaataaagacataaatctaaaaagtcttagtgatacagtaagatagtattaacttttaggaagatgactagcactcaaacttgaaatattttggaaaaggatccaagacctaagctctaaccaaagtcaatattactaacctacccttgaaatctctactgtctatgactatttatcagagaactaagaatagagctaccatttgatctagtactcccactgctaggaatcaatccaaaggaaaagaaatcagtgtatcaaaaagatacctgcatttgtgtgtttataacagcactattcacaatagaaaagatactgaatcaacataagtgttcatcaacagacgactggataaagaaatgtggtatatatatgcaatgaaatactattcagccaggagaaagaataaaatcatgtcttttgcagcaacatggatggaactggaggccattatcttaagtgaaacaactcacatgcagaaagacaaatttcaaatattcccacttataagtgggagccaaataatgtatagtggacataaagtgtggaatgatagatcagagagagttagaaggatggcgctgtgggaggcgggtggatattaagaaattaatgtgtagagtgtacattattcaggtgatggataccctaaaagccctgacttcctcactatgcaatccacccatgtaacaaaattacacttgtaccccatacatttacacaaatagcatttaaaagagaagtctctattgtcctaagaaaatgctcttcctttttttttttttttttttttttttgagatggagtgttgtgttgctctgtctcccaggctggagtgcagtggtgcgatctcggctcaccacaaccttcgcctcccgggttcaagcaattctcttgcctcagcctcccgagtagctgggactacaggcgcatgctgccacacctggctaatttcttttgtattttagtagagacggggtttcactgtgttgtccaggctggtctcaaactcccgagctcaggcccgcctcggcctcccaaagtgctaggattacaggcatgagccaccacacccggccgctcttcctcttttttatctgcaaatattaccataatcttaaaatgatattatagtatttcttcaatctgaagaacattatatattacaagcctaactccctagaacaataagactaggtagataaacagaaaaataaaattaaactaattatatgtatattttaggataagtttaagaagaaattaagtatttaaaaattattgaattgatatatgtcctgtgttctgcttaaagcatgagacattcaaaaaaatccaaattttaagtggtaattatggtatcaattaagtaatgttattttattataaatgcttaactgtttaaaaagttgattttcaaagttttattagttatatcagtttactaaatggagtactaaataaattataaataggccgggcacagtgactcacacctgtaatcccagcactttgagaggctgaggtgggcggatcacctgaggttgggctttcaagaccagcctgaccaacatggagaaaccccgtctctactaaaaatgcaaaagtagccgggtgtggtggtgcatgcctgtaatcccagctactcgggaggctgaggcaggaaaatcgcttgaacccgggaggcggaggttgcagtgagccaagatcgtgccattgcactccagcctgggcaacaagagtgaaactctgtctcaataaataaataaatgaagtataaatagtagtctgtatttcttaccatgccccaaatacctcatatatgaaattatttatttcaggagtgttaacacatattttaaggaattgtttcaataagaaatcaggtaatccctgtgatgtctctggtctgctctgaaaagctaaattaaagaatgagatcttggcaagaggctccctgtcactaatttcatctttaatagatgtccgttcaatgactgtgatccagactgtaaatctatatatgattgcccacccacgtgactgcatatttgcttctggaagctgggatgtgagtgactagaaagaggtaatggagaaactttttgggtgattggaatgttttatatcttcagaggaatgtcagtttaacaggtgcatgcatttaaaaaatgcatcgatttgtatacttaagtttatgcattttcctatatgtcagcaggaaaaaagaatggaaaacaaatatgaaaccttggttgatgcgtgtgctttatgcagtagtatgagtcagcaattctcaaactcctttttgtgttccaggctttccagacttcagcaaatacatcaatagcttgtggataataggaacaatgttttttgttattggaatcaagatgtaaaaatacagaagacaaggttaggatttatcctgtagtattctattggagttggagtcattgttttgagtatatatttgtaggtatataatagagctttgttcactgtatagttttaggaacaggacacaacatcagtagccataagcacacaagatcatgtttaccaaaatacagaaataactgaaattagttaaatagaaataaggtttcttacagaaaagttgacttcaggactaggatagaaaacacacaagattaacctggaacatcttattttgacagaaaataaaagaagttctcaaagagtaggactatattaaggctgataaaggagcaagcttgagggtttttttttttcaaatagaagaattttcctacctaataactgacctgtattcaaaaatattaaaaacaagaaatacagaaaggggctactctacactaaaggagatgaaaaaagtgtagcatccagatgcaatacactatcctgaattggttctaacatggcaaacatgcaaacaaaataaagagcatatttgtgaaattaattaggattgtatttcattaatgttaaatttccatgatttgctgtgattctgtaggaagtgtcctgtttttagtaaaaatactctgagtacttaagagtataaaaatacatctaacctactacgaaattgttcagaaaaaaaagtctcctgacttagaaagagatgataataaaatatacagaggaaaatgtaagcaattggtgagtctgagtaaaggtataaagagctctgcactatttttgcaatttttatgcatgtttgaaattatatcaatataaaaatttcataaaataaatatgttgaatatctattgtgcaagacttggcgtcttctttcatagagctttcctatgcaggaactgcaacacaatcaacattttattgcacattcttgcatgaatcgcagtaggcaaaagcattgcagcatcttattgttgtcctgacaagcaagatagatatccttatgagcttcctacagatgaggaaacggaaacttagagatactaagttgcttgtccataatcacacatgtgatttgttggacatacaggattaaaatcctctcctttggttcaaagtcaaacttgccctttaagccacaggaaggttggcccacacttccaaatccttcttttaaggttgtgaaaggacaataccacgatagagaaaccgaacaggcacagggttatttagaatcactcaggagaacttagcctgaggaatgcaaatgaagtgttgatgataagattaaacagaagagctgttcaattaaaccatttaaccacctgcaggttaaaatacctggaacaggtttacactgagggcaagccacttgtgtggcatgagtttaataacttgcttgatctgagttattctttttattaggaaattaagctttccatagcacaattaggcttttaaagagacagataagagccagtattaacatactgataaaacagtttttgattaaactatctaaaacaatatcagaaactttctttgttagagacatgaagtagaaagcaagaaaactcttaggcattagagaaaaaaaaaataattccattgaatgcctaaggagagtaaaatgcgtggttggtaaggataattttgaatttatcagaattctagtacaacttacctttgcttgtgcttaagttgaaactgaaaagacattttattgtcctatgtgattgtgtgagagaagcaggagcctaggagagccaaagtaacaccattttaagttcagccccatcttgagactaacaagacacattccttgctggtcatgacccatagtcataaaatgtttattgttgaggaagcagcctaaagatacctacgaggacacattcctacaatggaaagtccaaatgtatcaacacccataacaatatatgctttcaagataattatgctttgatgtacttacacactgcaatgtcaaggattgttttctccaaatcaatggaataataaattttgtcaaggttactctcatgtagacacagcctagtttagtatttacatagacaagacccccatagaagaaaaacttaaagacagggcgttccttctcttgctttctaaggatgccctactttgtgactcaggagctttcaataaacgatctttttgcactgcactctgcgactggccttgaattccttcctgtgtgagatccaagaatcctctcttggcacctggatctggattccttttctctggtaacaattggacatgtgtttatactaggtaaaactgcctttctattttctacacatatttgttgtttgaaaagctatgagattggtatcattaacctattagaagtacatctgtaaaatagataattgaaagacatcactaatattactgcgagcctgattgatgtttagacagcatatgtttggcaagaacattaaacaggaatttgccaaattcaaggttgatatagcaaggttgctaacttattaagatctacctatgtgcaacagaaaacactgactttttagctaaaactagctttaatttgcatcacagttaggatacagatgttatgctatccgtgacatgtccaacgcaaacaacatgtgtaaagattaaagccatgtttagaaggggatggaaaaattgcctctacagacgcttgttatagtatgaaaataaattacaatatgattattaggaggcagcaaagtcaagagggtgcactttagttaagggagaggctgcaatttagtctccaggatgtaacactcaatggatagaatcagagagagctttagatgtagatgggatggtgctgtcggtagctcctttggagaccagctatttggcaaacctgagagctagttgagggtcctttttctccaaagtcctgggattatgcatttgagtctactttcactctgatataatgggtatttaggcataagtgcaatcttttaatgttcattctacctggcattccccatctcctttaaaattttcacaatctctgtgtctgacagttggtcttcatttacccaaggatcttaaatatctatgtgggtaaggaaagttgagtcttgtaacctgattaactacggctgcctcgtccatgcccggttctttcctcgtcaatgcctggttctttctaacatggttctttcctctgaggttctggatcctggctacagagaggcttactctaatcctcatgggtaaggtcattcactggacacctcactgacatagggacaggagatgagtcctagatcaagctcatacgtattatatgaggaagctcccttttctcctgactgaattcagaaccatgtgactatctagagaggtggcatctttgatgtggaagaggagcatgaacatgttcttgggtccaggatcatttagcttttcctcctttactcccacccccttccatccactctgttctctcctctaggactgcaaaataaatgtcaaaattcaacattatcttgtcctattatagtataaaacagagtcagatacggttgatattagttctaaatttcagttaataggtagcaatcaaaatagatctgacttaagaactaaatacttttatcttaattcacaacaaagtgcttatccatgaacttccagagcacagtataattgtaatttgagggctacctaagaatactgatactgacaatttgctagcaataaatattggacaaattgaatggtaaccagtacaatttatacaataaatactaatttcacgctcttaaaaatgcttaccttttgaattggcaaaagtttccatttttatgtatgtaaaagtgtaaaaagatctaatgatgtaatatctaatgtagaagaattaatattcatatctaatgcaggataattttttaaaatgtatctctattttcatacatgacattaatgggaaaataattggaatgtttataatgtcataaacagcaggatttccctggtgggatggttttgtgatgctgcatgaaatgggacgcttggcagtgtctgctgtggtgacctagtttgggaagggacacttgacatcacactcacccatacacgcagtgtgcggcggacaccagccagtcactgctgacgagagatgcgccgcagagcagtcggccgccataatacagacccacaacccagggccaggccccttctttggcattacttcctccaacaatctttggggtgatgtcttgagctgccagtttttttccacaagctattaaaataattggagaaagagcatctatttcatttttggcatttcttctgatggtgaaaattgagtggtaacaaaataacttcaggtgacataaaactctattcagaattttaaacagaatgcttgaagtgggatatgacaacatatttacttacatttatggttacactgtaaccgaatcaaggaatcctgtaaacactgttgactgtaatagaagaacaatcatatttttaaaattatgcatttaatattttcaagtcaaacatcatataggttatcctacttttgctttagtaaaatggacatcttaatgtctcatatatgaaatgtagggagactgaattgtaagccgaagaagccccagtttaatgtcaaatagaggtgagtttgcatccttattctaccatttctatgtgacttcagggaagttactcaatatccctgagacccagtttcttcttccataaaatgggggtaataatactttattggagtgttgtgagaataaaaagcaatatttgcaataaaactattacagggccttatacacaatgaaattctataaatgatagatattgttatgttacttgaaccgacattggttttcatcattctataacacagagtatgcctcagtattgccaatctgacaactattccgtgcccaacaccgtgtatgaggctgtgtgcttcattcagggaattgaatgatgaatgcgtcacaggtgctgctttcaaggaaggcagacacgtaagaagcacatataaaagaaagcacaggcaaaaattactgaaaactcatcacctgcttagaaatttaaataccaacttttttcagtgtcaagaattccattttaaacaaaaactaagcaaatttgttttacagtgcattatacttatcagccactagagatcagtataacacaagaaattagagtacttgctcccactatttccaaatgcaaccactgcagatatcggctacattaaaacacacacattatacatgcagatacacaaataattgtaatgacttacttacatttatatacttagctacagctaattgtgcatgctgtttagatctttaaaaatgcaacgtaaataagacctaagatccacacgtctaatcaaagcaattcagtgtttcaggaaaatatatgataaagtttatttgaaatcatatgtatacgtattgaatgactggcatattctttacaacacagaatgattttagttgaaatataaggaagtctatctttttagtaactagtgtgcatgcatgtatatcaatctagatatattgacatgtatttctaacaccccaaggaagtctcaattaactcccctttttttcaccctgtggtgggaggtggtggtctgagtctgcatatatctcacaataggttacagaatcagaataggccgggcgcggtggctcacgcctgtaactccagcactttgggaggcggaggcgggcggatcacgaggtcaggagatcgagaccatcctggctaacacggtgaaaccccgtctctactaaaaatacacaaaaattagccaggcgtggtggcgggcacctgtagccccagctacttgggaggctgaggcaggagaatggtgggaacttgggaggtggagcttgcagtgagccgagatcacgccactgcactccagcctgggcaacagagcgagactccgtctcaaaaaaagaaaaaaaataaagaatcagcatataggtcagtagatttttatagttggctgaatcattttccctgacatcctcttcttttacctattttttattacaaccactagcgcaagggcattttcaaaaacaccagttttcatagggatacaaacataatcatctatgcaataaataataaatgcataaataaattaaccaaataaataaatgaacatatgtctgattttctgccaacccaatataatgtggctaattaaggaagggattaaggacatttaattaactggcttgttgatgtgatgaaaggttaaaatatgtctataaatgatgtctctctcaaatagcacacacatacattataatagtgacgtcaatggaaaatgatactggcatttcgttgataagcatagaataagctagttttgatctcaagcatgcatataattaacataaatgattttaaataattttttcttacaaatttttaaatgcctctaagacgtgaaaagaagaaattctcaatgttcaaactgcttcaggatctatatggtaatataaatttagacacgccttacaggaaaggaaatctagaagcctgctttctcatttgcagatgctttgcttcatatccgatgagactcataatatcagtcaaggcccagcaaacattgatataaaacattcaactgcaaagttctttttttggtactcaaaatactcctttaccatttttatttttttactggttaagctcacagaaatgttaacttttcatgaaaaactgaataattatctaatttcattttttaccatgaaacaaaatataccagcaaagcatcttaaatccttgtttgtagttatggcttcttgcagttacattcttcccacccacagctgttctttaatggaactgtaaaattcagaagccaatttcaacaaaaattaccattaatacccaaataggagaaatgacttaatttagctaaaacagatctttgaatacaggaaagatgctgctttttaataccttagtaaaggctataaaagtaaacctaatatcaaaaagtaaaagagaatatgtagacacgatgaaaggtctagacttcttcatttaatattcatgatctatttgccaaggaagagaaaagaatatcaagatattcccctctttcttctcttttagtggtagctaatttggtctgcctccagtctgatcaacactggacctgttttatcccagttctcacaatttctttccaagtgatttaattatttattaatctgaggctaatgataaaaaagggtataaaattaaaacatgtcaaatccctatgagtgtgccagaaatttacatacagaatatttcttttgaccatcttatatgtattagggttagaaactgttatcagatattaaatagatactgtttgagattacttaaataataatataagtcaaataactttcaagattatatgaccagtatgtaatagcattcaaatctgactggcttcaacaatctatcttctgccatgtctatgtacaactagtctaagaacagatttagggacccacctgggtgttagtattaagtggccatcaggtgctgtgtttaatttgacaaatggtccaccatcggtagggaagattggctttgatgagtttccactcctagagaaaaaagaaaaaagcatacagacaaaacaaaagcataaagaaaagaccataagttagactttcagttccttaatgctatggacattaaaacaaattatgggataccagccaaaaaaatgaacgttttaatataaaacttcatgtgttttcctatctaaaggatgatgcaaatgagtagaattacccataatcccatgaaatgtcattttaactttaatgtaatatctttagtctttgtttgcattcttatgtattattttacaaagttaaatcattacatatatcacttagttacctgttttataaatgtgattttttctatgttgtcaaatagtttccataaaaaccgctttgaatgacaatttcccagcattgctgcactgtaatttattaagcttttctcctgttgtatagctcatcttttttttggctcatctttttaaaagtgcatgtagataacaacatagacagagactatcttcagtgtttaattttgctttgttcttgatatttcattcaattcaaaggctaacaagccctaatttaaaggaagtcatgtgactgcactaaaggagagactatgcagctttggcctgcaagtgtcaattggcgaggcaccacagggtggagagagacacctctgtgtgatcaaagacattgaggccccaggctttcttttccctgaaaacctataattcccatgctctcaactgtgagctctaattgaagatttctcttaattatcctgacactcttttttagacttagctggagacttttagcttttaattcttaatcttgtttcttgccttttatttcagattttaatcatcatataaaaatatgcctttaggctggaaacatcctgatttctgctctcttctaccagtgagcagggagatgatgtggttctaccttttggagtactgtgatggacccacccattgcctctttaaaagaagccccaatgtcttccccaggctattgccaacactgacccttttctgtctgtttccagggaacttccaagtaacattcaaagcttttctgatcaattagaagatacgaactatttagaaagtggttcttctctcttttaatgttttcatcaagctgaaagaatgtttagtaactttcatctactgaacgtagagctgggacaatagatgtctatttaatgttccagaatttaaatcttgcacttttattttgtaaacagataaaagtaactgaaacacacaaagccattaccatactttaataaagcctgaaatggatttaccaagggaaagatgagccttggaattcctattgttaaagattatgctattccaccaagtgggcagaaggaaaatctcatttaaatatttacataaaatgtatttgctatggcttagaaaacaaaacaggtgtgaagatgtcaaagggtagctgagaatgtagaaagtctggaatgctccagatcatgaagaacttcacagatgcagaacacttgtatttaaggactcacacatttagagcagaccgaatctagataaacacagatgttagaggaccttgaatttcaccattcttgcaggttttggtagaaatcctcacagtaatctcagctttcaaaaatatcaagggatgccatttcaaattaaagaggttttagttgtgttttgctgtctgcaggctccagaaacgtcactggaattcgttgattcgtgaacatcactgctgccagagtaaagttggttggttgggagagtcattctccagcctgtcttctagacatctctcttcttttcttgtgtttgatcatttctagtttcctcattcagctgaatgcctgccctgtgtttaacattcttctaggtagttttccacgttcttgactccccatgacacattctcaaagtgatgctctttccagacaagcagcaccagcctcaggagagaacataggtccaaaggcaaattctccaccctcactcgaggccgacttagccagtagtcttaggcctgctctagggtagggtccggctatctgtatttcaccaagccctccaggtgatcctggtgcctgctacagtcaggaaatcatgttatagccaaatatagcatctttttctgctactggcatgaggctctgctttttgacatacaaagtgacttctagttacccaataatctgttttacggcactcatgtctaaatgaggaaaccttttgaaaggtgtatcattaaaaatagatgttagagaggtggattttagactcttcacttatctatagctcgtctcttggatatatcccccgtctcttggatatctcttttaagacagagcccgaagggatacattcctttttctttctttctctttctttctttttctttctctctttttctttctttctttctttgtttttcttctttctctctttctttctctcttctttctctctctctttctttctctctctctctctttctttctccttccttccttcttgccttcctgccttctttctttctcttttttttttttggatactctgttgcctaggctggagtgcagtggctcaatctcgactcactgcaacctctgcctcccaggtttaagtgattctcctgactcagcctcccgagtatctgggactataggcgtgtgccaccacacctggctaattttttttgtatttttagtagagagggtgtttcactatgttggccaggctagtcgtgaactcctgacctcaagcaatccacctgccttggcctcccaaagtgctgggattacaggtgtgagccaccacacctggccagatacattaatttctctggaaattcacaccaaaatttggagaaaaactaaattgaacaagtatttaaaaattatttgtaaatattttttaagcaagcctatttatgacacatctacttctggcatgcatttggataggattgacagtgatttttttttaaacatatgcctattctagaaggaaagatgactagagccaaatttttaagaataatgggtattcagtaaatgccacttgttccaccccgagattttcaaatgctgctccagggtggcactttcactatccagcagagaaaattggagatacatatacacatggataaaagatgtgtaatcttattttctgagatgatcttttcaacatttttagtctcaaatttaacatgagaaaacaaatataaatatgtcgtcttgggttatttagagtagttgaacaaaatactccttcaaaaatagttacaaaattatcacataattacatttttgtactaaatattgttaccagtaacataagagtagggtatagggccctcagttcataccaatgtttctccagatgtcagttctacatgttaaatttgggatttgtgatggactacctgcatttcaaatcctgtcaagtcaaactcattctttttctgactaaacacaatttatttctttgtaagcacagtaaacagattaaaaagcagcagaagtttacaacaaactattccttattttaagaaatcacgaggcaataaatatacattaaaaatcttcttcacagaagaaaagattaccctatgtgaagtcaccatttacttttgaaagacaaaaatctcagaactactaaaaaattgaattcagaggaaatgtattatattaagttctgtaatatttaagcacgcacctgaggctcttactgcctcagttttcttttcttgcaaggaaattagttgttgatttttagagaggcactctgcgaagattaaaactagactgtacattttctaaatctttaaaatgttccatatttgcagatttagataacttcattacacattcacatagctgtttgaaatcagaagtttagtatcacatagaaactccatatagcattaccttgttgacatactaatgcctcccggaaacctatttctaagcttttattgccatttttataggttatataacctcaaagagctctccttactttaggaaaactttattccatgtgagaaaagaagcatatagatgcaaccattattatttttgaggtcatagatggcgtataaaaatatactcatagatgaattctagggagtaaaaaaggatatctcaaggatacttgcatggtattaaatcttctgctctgttcttagcccctgactaggtttcttctcttttgtctcacttctcaggctgaatttgctgtgataagaattcttccctggagcaggagcttaggcggggatgttttaaggcctttggacacactaaagctaaaaagaataataatgcatgctgcaaatactgcaactaggcactgtagctcatttcacaccccaaaaggtttaagtaatgaatagagccaggtgggattagcccgaaaaggcttttggagaaggacggttgtttcttttcagattggagggaaagaaggggattgatttagcaggacagaaggcagggggaccattttacaggcagaggcttggtggatagaagagattcgatggcaaatcatcccactaggaaagtaaaggcatgtgggcaggtaggtagaaatgccatttctgagctggacacatttccactacaattatttaaccatgtattgcatttataacaatacacctagcacacacctagcccagtgatagctcttagcaaacaggtaagtttaattaattttagattttctgacttccacccttaggagttgatggcatttactcagaagtaaagaaatgtcaataaaaacaattatcttaacctaatcaatttctacttttgtgcaagctactgtattaagagcaagaggtaaattgatgggttagtctggtagctattctctgttatcttacagatgcaatggtattacaaaggaaagaaactgctggtacctccttcctaccaaaaatacgtctgagagaagtgatacttctaggagattgtcaaagaggcagaatctcttcatgggcaacatcttggaaaccttgggcaacgtgaaccactttaacattatttccttagctgctgctgctgttggagttccttttgtttgtttgtttgtttgtttggagtagagggcatatgacacacacctctacatttcttattaagttttctcagtgcattatcactttctaagtacacatgagtgaaatttcctttagaatttagtgtcctttagaacttgtcatccctttggaactgttagcatttatcttatttcgtcaggaaaattacatggttttttaatgttttcctttttgcgtgggtctccaggaatctcagacataagtgttagtaattacaccgacctttcatgttttgtagatttgcctctttatttctttggatcttatttttctgtagtattctattaactttactgcatatgttctttgttatatagacctcagttcctttttggaaaacagataatggaagaaaatcatgggggaaaaaagaaagaatagaagcatatgaggaaagaagaaagaaaatgaggaaaggagaaagaggaaggaaaaattaaagggagggaggaaaaaggggatattatttcattggattttatcgattttattcaaaaattgttcttcatctcatagaatatatagcgttaattacaagttgagcagttggaagcactttttagaataaaagcagaatgaataaggaaggttttgttataagcttcatagggctgaggttttctgtccttacctatttctgttttagaatatagaaacctcctcttttccaaataacaggatctaaggaaatgataaaggacattgtcttgggtgaaaacatactctcttgtttttatataacaaaataaatacctatacattacagataatttttggcagatgatttgtaattgtgccaaaacataaaagatgttctccctcttttgtgtgtgtaattatattcttagtaatttcctgacaacaaagaatctctttggtgacaaaatacatattaaaaagtgtaagccaaaatacgaatgaaagacaaagaagattctccctgaatggtggtggtgcaaagaaacgacatttcacaaaagtcttgatttccaataaaatattttcaaatgcttagtaggagaaaggaggaataatgtttttccaagtaagaagtaatacccgtctgtgggtggtgaaaaccttgctatggatatttttcactctgttgatgatatccttctcagatttctgatgcaggttttaaaaaattctccatttgatttcatctatgccagggttcgtgggggtctggggtggttctaacaaagtcaaagtacgctaggacaaactaagaaatgtcctggattaagtcagatgattctcaatagggtgtttaaacctggtacggtagaaaaaagttgtttgatatgtgtgtgtgtgtgtatctttattttgtttttattaccaggtgaaatcaaactgtcaaagtttggggatgctttgtataacttctatgttgttttctactgaaatgagtatatgaaggatcgtgcgtgtcttgactactctgtcagaatgacctcggccttttaaagaactaagacctctgggtctcactccagccagggtccttcacctctttggaatccatggaagttcatgataacatgtaggaggttggtagttggcaaagaaataattacatctttatttttactaactttaatctcttcttctgatacaaatgtaggtgattaaccacaaaattattagcaacatctataatatggtcaccaaaatgaactgcagatatattcatatcatattgcagttgctagatacatataaaatatcatttatgttcacctttgatattacagtggtcattagagccaccagtgtatcttattaaatatgttaataaagaaatatatatttccatggatttaaaaatttttgataattatttttaatgtaataaatttcctttgtagttctgtgtgttttagtttatatacttaaaaatactcttttttgtgtgtaattatattcttattaatttcctggcaacaaagtctcacttgggtgacaaaatacatattaaaaagtgtaagccgaagtaggagcgacagacaaagaagattctccaaattaagtttccccagactgacaaaagtacctatgacacataaacaaaggttgagagcacttaccctaggtggtggttctcaactctagaatgcacctgaattacctgaaggacttattaaatcacagactgctgggccttacgctagacttttgggttcaataggccagaggtaggattccaggatttgaatttccgtactttttttttttttttttttttttgagacggagtctccctctgtcgcccaggctggagtgcagtggcgcgatctcggctcactgcaagctccgcctcccgggttcacgccattctcctgcctcagcctcccgagtagctgggactacaggcgcccgccaccgcgcccggctaattttttgtatttttagtagagacggggtttcaccgggttagccaggatggtctccatctcctgacctcgtgatccgcccttctcggcctcccaaagtgctgggattacaggcgtgagccaccacgcccggccccttgaatttctataaatttatcccaggtgattccatgctgggatggaatttggtcctaaaaccacacattgagatccactgacctagaccattctgaatctaagagtctgaggctgagactaggtgattcttatgtataaccaggctgtaccttcaagagctggtgtagctgctgtattacaagtcagtggtacacctattgtcactcccttgcccagagcagacataattatcttatcactgtgccttcccccaccctgctagatattaaacctattaagtattaatgttaaaaagtatcaaattatggtagtttgctattaatgatttgctctttaattatttttaattaatgcatttctaattttaaaatggagaaaacatcagagttataatttgtgcttcaagtaaatgatggactttgtagttaagtcaattaaaccaaattaaaataagatttcttccacaaccttgcccaaagcttttctcacccaccccaccacagtaacatagctaagaataaaagtaccttctgtgctgaagttgcaaatcaaaaaattttaaaaatgtaaaatattatttatttctgtgtaaagttagcgaattaagtagaaatcatctaaagccaaaggttacattttttttttactgttcccatatctgtgttgttgttttgtgtctgagttgtaataagtcaaggttttccccacatacttgaaaattttgggacattggcagaaaatatgaacaagggcagaagcactatatgtctaccacctccttaaactaggatgaaacataggttctatttccagtgttccggaactcagtgctaagttgtataaacaaattcattgcggtggttacatcagaatttaaatgattatgctctatgtttttgaaaggcttattgaaaaacattttaatctcttcccccagtattttcaaaacaccgctgcaatggaagaaccttggggtaattctgtttcttattagcatttgagaatgtaaggctcaatttgatgttcctgatatttagaagtatcttggacaggactaatatgggatttaaaaattaacaccaattcctcataggccaccttattagaacacaaataactaactccacttttgagatattagtatttcctaaattctctaaagttttacagaaatgatgtttttttctagattttaatgatttagcagggtaaatcagctatatcatttatatattgggttagtaacagggaaatgctatttgctaggaaataccattaaaaaaacactaccctaagtttttttaacctttattgttgcatcagtataaaatgttttctttcatactttgatcaaagacatgaaaatgttattcaaggtactttttatttatgcatgtaatgaatgataggaaatgaaaaggtttaatataaaaaaaggaaaggctaatgaaataggcctcataggatttactagaatctgaggggaattgcattttgtaccctatctgcataaataatcttgagagactacagtggctttttaataaattgactatcaaattactttctactgcagcaaacacacatcattttaaactcactaagttttctttcagttaccatgcaccagtctagacaaattctcattaaggatgtaactttctttcaattactagagcactatggagactatttaataagcacaggctcaaagattaaagtctttgcagagattacctaactcatttacgaagaaagcaagcacctgaccttcatcaaaaatattgtatctaaggcagtgggatgtactacttgtgttacagacactaaaaaatctggttatttgtctctctgtatctggttagaaggactacgattcgtgggaaatgggatcagtgaactagagagtaaaatctggctggggaaaccacgtaagtaaatggaacagagctgtgtgtcatccactcagctcaggccattttctagaaagccttccttgacatgcctttattgacttaagttctgctacagcacattgcatttatcacattatattgtaatgatctattatgtgtctatcatcaccacataagcatgtaaagccatgtcttatttattcatggaacacatacaatatcatcacctgtgcttagatttctgacccaggaataataataatatatttacatgatatactgttaaaatgtaataaagatgtatgtttccttccaattcattggaaggaacgtaaatgtagggatccacattttgctatcagccaactaacaggtttcattcaaattaattgaaaaaaacttctgtcaaagtaaagtgttgatcattttgacctttgtgaataactcatcttaacccaatacatcctccaggaaacaatgtagttaaaattcacaaaccacaatagaaagaactcctctttttataatcacatggtgatctgcgaaaagtgatgaattgagacacaaatctgggcagggaaagcccagtcatccggggcacttgggcgcatcaattgtggaagcaaggtcaagtccccagtctccttagcttaatctttagaaactaagttcctgagtctatacagcagctcctgagcaattgaagctaatggcttcctaggacctcacctctttgaattcactattgaactaaaattagtgtttaaagtaggaacttggaatgaatgccacttacccagttctttacttgaaatgaaaataaacaactgtcactttctgggttttgttgactctttatcaacaaaaattgtttctcctacaacttgccctcttccaagactttatgtctgaaagctccccatgtttaaagagtttttgttgaagtttatactgtagaataaaaagaattacacacacacacacacacacacacacacatttaaagtacaggaaggctctgactaatatgcataaaccaaatcgatttttttaacacatactatttataaaaaatatgctcaataaaagtaggaatagaaagaaatcacaaaagaatgtggtttgaccccattttataaaaagtttaaaagtacatatatgaacaaagatctagaaaactatacactgagactttttttttttttttaaagttctgggacacatgtgcagaacatgcagttttgttacataggtatacatgtgccatggtagtttgctgcacccatcaacccatcatctacattagatatttctcctaatgctatccctcccctagtcccccacccactgacaggccctggtgtgtgatgttcccctccttgtgtccatgtgttctcattgttcaactcccacttatgagtgagaatatgcagtgtttggttttctgttcctgtgttagtttgctgagaatgatggttttccagcttcatccatgtgcctgcaaaggacatgaacttatccttttttattgctgcgtagtattccatggtgtatatgtgctacattttctttatccagtctatcactgatggacatttgggttggtttcaagtctttgctgttgtgaacagtgctgcaataaacatacgtgtgcatgtgtctttatagtagaatgatttataatcctttgggtatatacccagtaatgggattgctgggtcaaatggtatttctggtctagatccttgaggaattgccacactgtcttccacaatgttgggaaaactggctagccatatgcagaaaactgaaactggacccctttcttacaccttatacaaaaattaactcaagatggattaaagacttaaacgtaagacctaaaaccacaaaaaccctaggagaaaacctaggcgatatcattcaggacataggcatgggcaaagacttcatgactaaaacactaaaagcaatggcaacaaaagccaaaattgacaaatgggatgtaattaaactaaagatcttctgcacagcaaaagaaactatcattagagtgaacaggcaacctacagaatgggagaaaatttttgcaatctagccatctgacaaagggctaatatccagtatctacaaagaagtaacaaatttacaagaaaaaaacaaacaaatttacaagaaaaaaacaaacaaccccatcaaaaagtgggtgaaggatgcgaacagacaattctcaaaagaagacatttatgcagccaacaaatatatgaaaaaaagttcatcatcactggtcattggagaaatgcaaatcaaaatcacaatgagataccatctcacgccagttagaacggtgatcatcaaaaagtcaggaaacaacagatgctggagaggatgtggagaaataggaacgcttttacactgttggtgggagcgtaaattagttcaactaaactgattatttatataatgaataatgaaattcatttcctctctttgctcttgataggaatttcgttcctgatgaggctgacatcacttggatgaggcttggagctgggaagtttccattctaaatgcacagcttttgagaatataacaggaactggaagctctcagtccaactgtaagaagctaagttaggtatagaaggaacgtacctcaacacaataaagattacatatgacaaagccatagttaacaatatattaacaggaaaaagttgaaatcttttcttctaagaactggaacaagacaaagatacctactctcaccactcttattcagtataacactgaaagtcctagacaaagcaattagaataaagagagaaataaagggcatccaaattggaaagaaggcagtcaaattgtctcttttcatagatgacatgatcttatctacagaaaaacctaaatactccaccaataaagagaattgatcattgaatttagtaaagtttcaggatacaaaataaacaaaacaaaatcattacagtttctttacatcaacaaccaactagctgaaaaagaaatcaagaaagtaatcccatctacaacaatcacaaaaaaaaacaaacacctagaaataaatttaaccaaggagttgaaagacctcttcaaggaaaactgtaaaacactgatgaaagaaattgaaaaggacacaaacaaatgaaaagcatcctatactcacggattggaagacttaatattgttaaaataacaatactacccaatccctatttaatgatagggatttaatgcaatccctatcaaaacaccaaagacattcttcacaggaatagaaaaaaaatcctaaaatttgtatggaaccacaaaacacaccaaatagccaaagcaatcctgagcaaaaagaacaaaactggaggcttcacactaccagatttcaaaatattctacaaaattatagtaaccaagataactggcataaaaatggacaacagaccaatggaacagaatagagaacaagatagagaaccctgaaataaatctatgtttacagcccactgattctttttttttttttttttttttaacaaaggcaccaagaacattcactgggggggaagaacaatcgcttcagtagatgatgctgggaaaactggataactatatgaagtatgaaactagacccttatctctcaccatatagaaaaatcatatcaaaatggattaaagagttaaatctaatacctaaaatgttgaaaccactagaataaaacattgggggaaacactccaggacatcggtctggacaaagatggcttgagtaagcccataaaagcacaggcaaccaaagccaaaatggacaaatgggatcacatcacgctaaaaagcttctacacagcaaagggaataaccaacgaagtgaagagcaaatccacagaatgggagaaaatatctgcaaactatccatttgacaagcacatattaaccagaatatataaagagctcaaacaaatcgacaagaaataaaaacatatattccgactttaaaaataggcaaattatctgaatagacatttctcaaaaaaagacatacaaatagccaacagaatatgaaaaaatgctcaacatcactaattactagagaaatgcaaatcaaaaccacaatgagatatctctcacccctgttataatagcttttatcaaaagagaggcagtaagggatactggtgaagacatggaggaagaagaacacccatagactgttggggaaaatataaattagtacagccactattcagaacattatggaagtttcttaaaaaactaaaaatagaactaccatataatccagcacttccactgctgggcatatattcaaaagaaaggaactcagtatatcaaagaggatatctgccctcccatgtttattgcagcactattcacaatagccaacatttggaatcaacctaagagaaaagcatatgttttataattagaaaactttgggcatatgtttttatagattggtatatggatatttacatatacatagagtgtatatataatgtattgcttaagtatttggcactgctttttaaagacaaggattagcctagagtttagcattacaataatacaaaatagacatggttcttccctttatagacctcatagtttaatatgacaaacaaactttaaatgatatagtgttataagttataaagataaccacatgtgagccaacatggttagtaatcactaaatcttcaaaatcattaaggatcagaatggtgggttagagttgccaggttgtaaaatgcaaaataagtatgttattactgctcattactttcattttctacctaattacttaattacttttaagacttgatgggaaggtaaaaaacaaatatggcgaaattacatatttgatgcaagctattaatgcattagactgggaggtataatacatttttgatgagttattaattggaatttttacttgcatcatccttgctgagaatatctttctttatccttctgtaatataaaatttatagaaatactgtagcgggagaggttatgcaaaatttttaattttaaagatattttacaaattttgcataacctctcccactacaattgtacttctataaattttccaaaaaaactattgtaaatgtgttgcaaagatatagcaaaagcatattctctgtagtacccttgtgattatttatctatattatgatataggataaaatgaaatatttcattaaaaaatcatcaaaaaatataaaatcatgagaaatgcccacacataagtattttgtataacagagtatattgtattttatataatatttacatgtactttatacagtattcatacaaaggttattaacagtggttattacttgaaaatggggttaatcaagatttttattttctcccttttgctaatgtgtattttctaaattcataactttataaattttaaagctcttattaaacctaatttgatagtaataaaaaggtttgcaaatctcttaaaaaggaactcagtagaattacttaccctagtcccagcagttgacaaacatcatttgaaatctgggtggtccagttctcagcacaagctgtatgccatatgctctggattctgaaccgcactaaaccattgttgttcgttgtgccattgaaaaaacgcactaaagacacagagagcataatggtagttaccagagactgaagggtgcggagtatgggaagacatcgttcaaagagtacagagcttcatttagacaggaggaataagttcatgagatctcttgcacagcactgtgactatagttaataataatgtattgtatatttcaaaattttgcaaaatttcaaattttctcatcatgaaatatggtatttaaggtgatggataggttgattagcataattcaatcattcctcaatctctctctctctctatatatatatacacactttttaaatatgtatatacacattctctgtatatacattctctctccatactttctattaatatatattatatataataacatcacattgtaacccataaatatatagaattaaatttttcaaatatacagcaaattttttggaaaaattaacaaaaaaagagacattaaagagattagattacacatgtggtcattttgacctaaattgataggagtaaattatggcctctaaactaaatgtgcaatgttcttaatatttcgagtttagagattgattgtagtttttcttaagagcatgatggaaggtctaatttgaaaaatataaatttagtagacaattttgctcttttatgtaaccataaaaatggaaaatgcagagatatgcaagtttattacaaatctatacagcaaataaacagaaaataaagttatctgtgaagagtatatataagagtatatataaacttagtttctgaaagaaggaaactcaagtttagggattactttaggaattccctccccaccaaaaaaaaaaaaaaaaccactttctttgtacttgcttttataccatttgatttctatcaacttacttatcattttacaaccattttgaacagaattttaaggccattagtggccaggtagggactggaccaagctaagcgcgttcatcaagggaggaaaacatcagtaattgtagtcttacctacaaacactatgttgtaattctataaaataatgctacattgtttaccttttttttcctattatgacaagagctaagagcagtgactacagaattatacaaacgtaggttcaaaaacagctatggcccttactgggtgtgcaacctttggcagccacttatcatttccaagctgtagtttcctcatgggtaaactatagccgattatttttttcttttttgagatggagtttcgctcttgtaacaaaggctggagtgcaatggcatgatctgggctcactgcaacctccgcctcccaggttcaagcgattctcctgcctcagcctccggagtagctgggattacaggcacccaccaccacgcctggcaaatttcgtatttttagtagagacagggtttcaccatgttggtcaggctggtcatgaactcctgacctcagatgatctgcccacctcggcctcccaaagtgctgggattataggcgtgagccactgcgcctgaccagctatacctaattcttgttgtggattttttttttaacttagttacagtgcatggtacatagtacgtaagtgttaaatatttgcttagaaataaaaagacataataaaagtatccattactcataatgttattgaggtgtggaaggggagctggaatgaaaactcagcagggcagggggagaaagtgaactataagtaagcacacaggtgcctctgaatgtgggcaacaaacagaaaacagtagccaatatgagtggtgctagcctgcttggtttggaatattgtctctgtggtattctcggcttcctatatggatatttgttgctctagaattacagttaataagtgtgaccaaattgaaacaaacaataaactgaggcctgcgtattaacttttcttctatccagatggggacagaggtgctaaaatcatctcagagatgagatgttctcgttccaaagcatcaaaacaggtcctaatagacacagttataatctttctttgacactgtagagtccaaatgcagaggctaaagtcataaaagtattttcctaaaaataagacataccacaatctgcttcatctgagccatcctcacagtgcagatgaccgtcacagagattcaccagtggaacacactctccatttttacattgaaaatggtctgccttgcatggctctatggggaaagaatgtttattgtataggataaagaaaacacaaatggatgattctggagtacaaatcccatttgctcccctttaaacatgagtcctttgccacagctcaaggtggaaccagctttgatactgagtaaatgagagttaatgggtgcagcacaccaacatggcacatgtatacacaataacaaacctgcacgttgtgcacatgtaccgtagaacttaaagtataataaaatatatatatataaaataataaacatgagtcctttgccacagctcaaggtggagctagctttgatactgagtaaatgacgagttagtgggtgcagcacaccaacatggcacatgtatacacatataacaaacctgcacgttgtgcacatgtaccgtagaacttaaagtataataaaatatatatatataaaataataaacatgagtcctttgccacagctcaaggtggagctagctttgatactgagtaaatgacgagttagtgggtgcagcacaccaacatggcacatgtatacacatgtaacaaacctgcacgttgtgcacgtgtaccctagaacttaaagtataataaaatatatatatatataaaataataaacatgagtcctttgccacagctcaaggtggagctagctttgatactgagcaaatgacgagttaatgggtgcagcacaccagcatggcacatgtatacacatgtaacaaacctgcatgttgtgtacgtgtaccctagaacttaaagtataataaaatatatatatatatataaaataataaacatgagtcctttgccacagctcaaggtggagccagttttgatactgagcaacaccatctacttgtttgctcagaaagcctcagaaatagtttccaagctgatgtgtatgtagctttagaagagtgtggatgaaacctcagacatctcttttgcagcaaaactcagggaatttctaagaggtggctgagaggttgtcaactcacctcttcctcgtaatttcgttagtatctcttcaataaacaaactcctccaccccaaacgaacatacaagcaacaaccattgaactgttactcaagcacagagaggtcccctggcctcaccatccaaatgatacttccaaaactttgtaagaaagaaatgtggaagttgtctgttggtgagatcaaagttggattgggtcggaaacagaaggctcaattaaagcttggtcaggcaggaaagggtagttacaaagaaatggaaactttgccgtatcggtaatgtgaaaagaagttgaggatagagctccaaacaagtacagcagtgttggaggcatgggcatgtgcttggcacatggagacacaaaaggaaaatgaaaaacctgggcaaagaagaaactgggtagatctggaggccgttggtggtggtttccagagtttgggttgtgcaaaaagaggcctagtggaaacattccttatttagaagcagctactgctgtttcctgagattgttcggtctttaaaagttttgttctgggagagccctcatatcactgggagagaggggtttgcttccctcttccagtgctttctgattatggcttaggaggtacagttatgtgctggaaggagagtaggaactccatgagggccacttggaatttggttccctaacaatggtgatggctgtcaggtgtggagaggctcaatgtcttatcccctacatggcacgtgaacaatcatatggggaagcaaaagcacttgataaaaataagaaacagggaagcttctattttgaaaactattagtgactattagtcaatataataacattactattacattgctttcaaggagactcagttcaggttaatatgatttcagaaacaaattataaaaatatccatggagactttctgaatttatgatgaccaaacataaagccacttgaaaggaattattcctgttgttttagaatctaagttgtagactcacatctgagagtactgaaaaataccattacacttctaaagagagggactcagtatagccatactatacttattgaaaaaaataccaaaagtagtccagcaactatcaatatccatcatctattttcagctttttaataaaagggcattagagtatttttctaaaaaatatattgaatagagtatttgagggggggtgtttttatgggggtaaggggagggtggtgctatccagcaaaccaagtgtgggatgccctaagagaatcaattcctaattgagttgcctgaaagaagcaaggtcagcatctaactccctggccaaaagttgactacactgcataaccacaaggaccaggctttcatgggactagtgtaagggctttcagattttttaaaactctgacattagtatgaaacagattttaagtaataactctaggatacacatcaatgtgtgtgtttgtgtgtgtgtgtgtaactaaattaaaatttgcttttactctgttctattatttcccatcccatcccatcccatcccatcccatcccatcccatcccatcccatcccatcccattctatcctatcccatcctattccatcccatcccatcccatcccatcccatcccatcccatcccatcccatcccatcccatcccatcccatcctatcccaacccattctattccataacaaggcataaaatttgttgggtagtgaaaccaaataaattcatttcactaccctggtttttgataaataccaggataaactgaagtatactgaaaatattaatgagacagtgacattattttcctgaagtttgtgggcagatagctgtgtaaataaagattggtatcaattcctatgaaatgaaatcagaagttaggaagttggcaaggtggacactggaaagatgatcagatgacaactgcctggcagggaagcccggctctagcacaaaaagtggaggaatggaacctggggattagggattcggagctgaaccagtttataagagattattgtactataagaggtgtattgtctatagtgcaatattccagggctggtggaacaatgctctgaagagctcacaagtctgtttcacaacagagctggcatttggccagaagctggtgtttgccaaatgaaaactacaatggtaaaaataaataaataaataaaaataaaaacttcctatcttccaacattggaacgatgggaagatggggaaaaaagggaagtggaaactaaaacaaagacaatatttccaccctcctctgccttaagttattaagccaaggtctgtgcctgagttgagggataaaagaagctttgaattagatgatataaaagtgttgatattatacttgactgttcattttaacacttacaagtgagtgtaagttactcagataaaatgatttaacaccggaagtaactgaaaaagtgtagagatctgcctgaaatattcagagccgaaaaaggagatttgaattaaaatagagacaaatgaaccttttgttttgcttatatggtcattgaggtcagtcattctgtaaactgaatatacaatatgccagctgtaatacccataaagccatgttttctcatctttgtatgtccaggtcttggtgaaatgtctttcacaaagcagggaataagtagatatttttaaaacataaagtaaattaatgtatgttaaaagattgatatgcctcaaaataagtatgaagcttagtaatagagtcaacgtaatataaagcaatttttaaaactatgatttcaaataaagtttaaaatttaagataattggctgacggtaattctagtgatttgaaaaaaagaaacaattttatgaattatgaagatataatttacttagttaaatttcaatagtggttaagacacaggacttaaagtaatatgaccttggttgaaggtgcaatttagccatttcttttaatatttctttgaccttgggcaaagaaattagcctgaggctcagtttctttgtcaataggagtaaatactacttttgtctttggtgtgtcaggagaacaaattttataagataatgaagtgtatttatcataccaatacatatacagagaatacgcagtagataatatttttaacagtaaaaacagtaacagtaaaaaaaaatcttcttcaccgatttttttttttttttttttttttgagacagagttttgctcttgttgcccaggctggagtacaatggcgccatctcggctcactgaaacctccgcctcccgggttcaagtgattctcctgcctcagcctcccaagtagctgggattgcaggcatgtgccaccacgctgggctaattttgtatttttaggtgagacggggttttctcaatgttggtcaggctggtctcaaactcccgacctcaggtgatctggccgcctcggcctcccaaagtgctgggattacaggcgtgagccaccgcgcccggcctttcactatttttcaagttaacatttttactccatgtgctagttgtgctgtttctccctacgaataacaaaataaataagaaaacatacctaatcctttcctctcagtatcttacaacaataattggagctatttgtatactctactttaagctttgaagaaatctgtattttttcatctgaaatctaagttaccttaacaagaaaatatttttagaaagccatggctggttgtttctacaaacctttataccatgagaaaatctggttacatatctcaaaatataatgctattacggaggttcttgaaaatgtaattatcaatttgtttcacaaacatatttttaaaccagattagtgagatgacaaatgggcagagataattacagattctaaagacagcattaatactttgactatatattttatctttctggtattaattttcctttagaaaattggaagtcttaaatgtaggtagaagtgtttgtattcatatattctgtcttaaatatatattttaatatactttatttaaaaagttgacagcatgaattacatgtccatgatcaattatattgatatacttacagaatgttagtcaccaccctttatttttaaattatcttattacttttttcatagcttactgaaatcactatgtaaaaaatgaattctcaatgacaataatttaatcttatatacatttactgataattttacccttttactaatgtagataggcaacatttaatttgaaaatcacatacgagttgaatggaaacagacaaatatctgaattaaaatttaaatgataacataaaaatgttttaaaaatgtaattcatttttgtgctctagctgaagctgttagggttatattctatgaatccagaaaaataataacttgtttctataagctgaatgaactggatgaaaaaatgctgaatggggaaaactgatctattgttactgaactgaacagaaattttaaaatctgagaagtataaataagctctttcaaaattttccttacacgcataaactggattctgattttttgcaacatacaatagttcagcttcattaagcagtctttaatccaacagtttaactctctctggactcttgaaatcttatttctgatagttttatgcccatggtgagagaaagaaaaagaaatattgctaagaattgaatttccccatctcctttttatgaagtctccagtagcgttgcctcatttagtaacatacgcttggtttaaaatggaacgaaattgatctctaagcacatgccacacaatctggggagggctcaaaccccctaaatgtaatcagctgctacttccacagttgcctgataaacactgttgaattccatcgttaagactctgagtatcagaaaagaggaataaggggacatttataggagacagatcttaataaatctatattacatatactttattacagtagaaatggaaatgttaggaacatagtacaaagaaaataagatacaaaaatacactatacaattgtgttaaatttcaactggatgcttggaaggtggccctaaaatagctccagaagacaagtgaagcaaaaacgatttttttccttctttttttttttttttttttttgagacggagtctcactctgtcgcccaggctggagtgctgtggcgcgatctcggctcaccgcaagctccacctcccgggttcacgccattctcctgcctcagccttcccagtagctgggactacaggtgcctgccaccacgcccagctaatattttgtattattagtagagacggggtttcaccgtgttagccaggatggtctcaatctcctgcctctcgatccgcccgccttggcctcccaaagtgctggggttacgggcgtgagccacgtgcccggccgcaaaaacgatttttgttgcccatttataattttttctaaaagaaccaccaaagtaaagtgccaggatgtgtgtccaatctcgctttcccttaccagcttaattagcctccacagccaagtccctgtttctgtaattgcttttcagtctttgggtataaaaaatctcgacggaagcagacggtgctgatgaaaactcaatcattccattactcacttcccagcagcatctgtcctatgtctaggaggaatgtgaaaccacactccccatgtatttatcatgcagtgatgggcattgaagactccattctagcttcaatcagggggattttcccttaaaaataacttcatacattacatactaatttaacagtataaatgaaatctagctataggcaaaagaaatctaaagaatctatacaccataaaattggtgtcttttgcgttgagagaaatacattgtactctgtttttgagtttgatcttgaatcaaagttgctgatattgtttttcaaaatctttgacattgtgttagtttcattataagaatctgagacaggaaataaatgctgatgaggatgcagagaaaggggaacatttatacacctttggtagaaatgtaaaatagtacagccattatgaaaaccaatatgaggctcctcaaagaactaagaaatataaaaactaaaaatataactaccatataattcaggagcccctctgctggatatttatccaaaagaaagaaaagcagtatatcaaagagatatctgctcatctatgtttactgcagcactattcttaatagccaagttatgcagtcaacgtaagagtccatcaacagatgaaaagagagagagaaaatggtatctttgcataatggaatattatgcagtcataataaataatgaaatcctgtcatttgcaacaacatggaggaaactggaggacattatgttaagtgaaattgccaggcacagaaggacaaatgttgcatgttctcattcatatgtgggagctaaattaattgatttcatgaagatagtaaatagaatggtggtcaccagaggctgagaagggtagtggggagggaggataaagaagggtttcaatgggtaccaaaatagagttacatagaaggaataagatctagtgtttggtaacacaataaaatgactatagttaacaataatttatggtacatttcaaaataactagagaagacaatttggaatattcctaacacttagaaataataaatgtttgaagtgaagaatatttcggtttcccagattcgatgattataaattgtatgcttgtattaaaatattacatatactccataaacatgtgtaattattatgagtccataaaacacaatttaaacaaactgtaactgtaacttttgatggaagagatttgtctctgtcttccttttgacaatccattttcctcttttcaagtcttttctcctttctcattttcaacttaaaataggggtttaaagacctactttttcttaaaaattttgtttcaagatgctttaacttttgcagatggtggaatgccatgtgctgttagtttgttctcatgctgctaataaagacatacctgagactaggtaatttatatgaaaaaggagaattaatggacttgctgttccacagggctgggagagcttcataatcatggcaggcaaaagaggagaaaggcacatcttacatggcagcaggcaagagagagcatgtgcagggaaactcctttttataaaaccatcagatctcatgagacttactcattatcatgagaacagcacaggaaaaacccacccccattactcaattacctcccaccaggtccctcccacaacacatggggatcattacaattcaaggtgagatctgggtggggacacagctaaaccaaatcacctataattatttcaattgtttggatacctcaataaatctaatcccttatctgttagagcacagtatttttttaaaaaatctcaattacttcaggttttactatttatctcagtttctttaaaagtataatacttctttcaaaaatcctttccttgacagaattcttgaaaaaaatttaggatggcctccagtagaatagtattaggcattaggtatttacttgctctattttatgatattttgcagaagagagtacataattttactgcatttaaacaagcagttattgaaccttgtatattttttagttgtgggattttctccttaaaacatgagaaatattacttcattgttttaatgttcataattgagagaaatataaagctgatcttattttcaatacttacaaaaataattttactttttctgctaagaattttcagaaaaatttccctcttgaaatttaaaacttcacacagaaaatgttataacactgattcttgctcattaattttttttttattgaacacactaagacttcacgatttttcaggtaattttattcagatccagaaagcgtataatttttctttcattgtatctttcactattagttttgatctgcttttatgttttcaatttcaggaatgtttattgttttcaaatttggtttggtgttttttcctgcatgcccattacagactctcatatgtttctgtctctctttacttatcattttttcattcttcatcatgctttcctgcagcaatttttgtggaaatgtgtgtgttctgcacaagaggttttgaattgttgtgcattagaccagaaaactaggtggttcacactgctaacaaaggcctctagtcaaatcagaaagattttattatggcagagtttcacagaaaattgctatggccaaagacggccatcttcttccaaatttcttgaaaggagactttattgtaacgtcacttgtgggagctggtactgtgcaaagactattctatcaggagccaaatattatataataatttaaaaaattagggtcataattttacatataaaagtattggtggtaacattttgtgtttttctgtcaactaaagtttgctattaactaatttactttctatataacagtaagaaagatttagcttttctccaacattacataaccaaagtctgctgtatcttaaatgtgctcagtattaactaccaaaatgtcctcagctatgtccatcacccttctatactttaaaagtgtaactcaaatgttgaattaaattaaaataataggtacaccacaaacagaaggaaactgaaatagcagataaaataattggcaaacaaacatggttatagtataatcatcagcaacaaaataatcaagaaacaaaatcagtgattcaattcaagatgacattttcaaaattatcttgattaacattttccaaagcaatgatcaaattttcttctaagttaaattctcgccacacacacacacacacacgcttatgtaaatacatatctattgatatttgcatctcaatgtattttgttctttacctaacaaaatcatgtcattttctgtatttcttctttttagtgtactctaagataaattataattttgtgtagatctcaaagtatttactcattgttttttattgatccatgtcactgttgcttgtaagtaaacagattggcttctaaaatcagtcacaaaatccagattaatcgattgagctaccacttacttctacctaagtagcatgcataatatcagttgtgcttcattttcagggccagatggtagacctctttatctgccataaagattaaggcaggcagctttctgggatggtgtcaaaagccctggtcagttgtgagtggaggaacaaagataaacataacctaatagtaactggattttgtattagataataggccagatgaagatgaactatccaaccctacctcttttctagatattcaagtgaaatacatcaattccataaatatttctcttcctatggaagagaaagagagatgtaggaagtagcatatattctgtttttctgacatatttgcacctggaaagaaccactgagttgccgggcagttctatgagacaattcatagtccaagtgaagtatcaagttacaaaaaaattctctgcagattgttgaatgcaaatatatgcaaatactagatatatgaatatatatatccatattcacatatatccatatatatacacacacatatatacatatatccatgatgaacatgccgctattttgtttgctcctgttgattattttatggatatactaaaacacctagtgtcggagggttgggcacgtcagcaaatagcattaaattcctacactgtggtgctttactctggttgtctccaataagttaatgatgttaattatttaattgaatgttgttggcatgccaacagctctcttgcctgtttccttctttgctctctgaaaatgttcttgatatgggaaacatgacagtcttctttccttagagggtcaagtatcctacttttaacatttaacatggccctcttcaatgaacaaaattcaacactccttacacatcagagaaatccaagtaggtctgcttaaaaacttttgtggctgcctactttgaacgaactcaggtaacggtactacagatgtaaaggaggaaaaatcatcttcattaagatgaggaagaataagtgtcacagaaggaaagcattaaaatcatgattttggccttgaaattctgtacacctttgctgttttgctccaaaagttatgatgcaatgtgtgatttatgggctcctacctggaatccccaagtgatagccagtagtaaagtttgctttaaaccctcctcttgccaacacatcgttagtgatgagaagcacagtcattctgttggtggtagagaacacatcctttactgggccaggccctgtgtacacagctgttccaaaggaaaacgagataatcagtgagatgatcctttggatctagaaggaaatgtaccccacatctcagttccctctgccagacgtagggctacatgttacatggctcgctcatagagcagccacaagtaaatgaacacacacattctcttacattttgaacacttctcaacaaagcaaacttctctttaaattttgatatttcttgaggtttgtgcaactctataatgtaatgatgaattacttataatatatctgacttagtaccactgctattcaaagctcatgttatcccagacaaatgactgactacttataaagacctttataaaacaatggagtttatagtcacctttactaaatttttgaccaaacatattcagtatttttttgtatgtggaatcataaacctaatctgaaggatggattatttggagattgggaatattaactacatggtggcttttaaaccttttgcccttaatccctcagctttggggatttcataaacaataaaacattctttactatatttcagctaattaaaaaatacatttattaagaaagttttatatgttggaagccctgaaagtgattcagtttcaaaagaccttcctgcctacaaattttaaaacaataaatcagagatctttctggaattcttatttacttttcaatgatttgtttaactattaacagatgaaatgatacgttttaattttttagatgatgagaactctgaagtttttatttgaagaataatttgatctaaaatagaaaaactatttaaaattttttataggtgtataaaagaaccaaatttcagattcctcagttcttgccactcttctagtcccaacaaaattttctttatttgttctatgtgtggctcccaaaatcctctcccaggaagctcacactctagaactttgtgagattttgctgtagaattctacataagggttgactgatgaaaaggttggggaaccctccccaccacactgtcccttgatgtgctctagaaaattttctctggagtattcattgattagttgcagcattcatgtgattgtatcctgactgcatatctattagatcagattttacaatacatgatgaatacaagtccaaagcacagttagataaaacactttttttgtgtgtgggagggcgataaaacactttttagttgtgccatgtcattcatcaaaattgatcatttgagcatctttatttaatgtgtgacttatcaagagacacctttttcttaaaaatgaccagtgtggccaacatggtgaaaccccgtctctactaaaaatacaaaaaattagccgggcgaggtggtgggcgcctgtaatccaatctactctggaggctgaggcaggaggatcgcttaaaccaaggagatagaggtttcagtgagctgagatcgcaccactgcactccagcctgggtgacagagcgaggctccatctcaacaacaacagcaacagcaaaaaatagtggtagttagataacatattagctattatgtttgactgatagctttttagtgtgtcagcatgtattctattatctatagaatacacaaaatttcctctataatagtacactctgtaatagcacaaaaatttcctctacaagagtacactctccctagccttattttaaaataatcaataaataaaaaagaaaaataaactggtcaattttttgaagcattctcaggtacctacacagaagcagctagtactagagacacagccaaagtaataataaaatgtaaagtaaaactcattaaaaattttgtataacacaatttgaatagtttgaagtaaaataaaaactgatttaagagctatctttggacatccgatgtacacataaagagaactacataatgggtgtccttagcttctagtctccaatgggtagtgcttgtggtagtcaattaataccagctggtaggaactgatgactcaaaaatattgtccaaaatagttaaactcatggagatagagagtagaatgatggttacaagtggctggaaaggctactgggaggggtggtggagtgaggatgatcaatggatacaaaaatatagttagaatgaataagatctagtatttgatagcacaatagggtgaccacagccaataataagttactgcatatttaaaaataactaaaagaatataattgggttgtaacacaaagacaggaaaaatgcttgaggtgatggatacagtattcacactgatgtgattattatgcattgtaggcctgtatcaaaatatctcatgtatcccataaatacacacacctactatgtacccatgaaaattaagaacaaatttaaaaagtaaaaataattagtcctgctttgtgaagaacgttcaagaaaaatattccgttgtcactattttaaatataccctatattgtaagttccacataaactcatgtcactttactattgtattttcattttgcaagttgtaaaagagtgattacattaattaagaaacgctctttccatcagcacaacatcttgagctttacaacctttacaatattcagattgcagacttacctaagagcaaggaatcagcttcttcaccatctcttatttcaactacatcgttaatattttctaagtcaaattcttgaaaatgaagttgtatattctttcctttttgtgcatttaaaatccaaacacctaaaaagtaagaagtaacatttaatttggaacacacttggtgatttctcttaaaagcttcactctcttgagaatttcaaataacttaaaaaaaaatcaattttttttccacttcatgaaaatcagtgtttcaaggtgtttcttttttcttttcattattttttttttggtaagaaaatatattggtttagtcaattatatttatagtaacatttcaattaaatttgaaattagtataattgatatttttatgaaatggaatactttaatcaaagtttacaaatattattttacctctacaatataacatttatgaatatcaaaggatactaaaattatagtttcatttatttaattttccatgatcaaatttagaagaaaattaggtaattaaaatccactttataggacaagtaagctttaatatttattttaaaatttttgcatttatttacatttagttcattaaaaaaacaaaataaaacaagactaccagcatcaataaacacttcttgtttttattgattttgtaaataattcaaccttcagatttttttctaggctattcttctctcattctgtattagttttctcattcactcttaagaaatataattatatttatatagtaaaatttctgtctttattttctgctcttttctcagatgcaggcaaatttattgacttatttactgtatatggctgtacatatttcaaatccaacatgttctaaagaaaaagcagaattatctcttttgcaaactcatttatcttattcttcctatctcagtggcactactaatcatccactcatagttctctatgcttgaaacctcagcaccttccttgacctcctttctcctaccacatccgatcaatcacctaagcctgttattactacctccaacatcctttgaaccccatttacttctcaacgtcccttgccaccacaacaggagttcaaatcactatagtttctcatctcctaattggcgatgctgatgattctcatcccttaccatcgatctctgatctaaaatgcaagctcgtttttatcgccattttcctgtaaaccattcaaagactctccagtgctctcagaataaattcaaacttcataacatggtgtaaaattctttcacacttctaattttacccattaccattatttaatttttcttggagattcaagaaacagttgtctcctactttggtatgtcaaggactctccacagagtcctgcctttacccttattataacagtattttggacattttgtgcctgacaacatatctgagtcaccatctatactgtgctacatttgtgtcttctttacttacttcagattaaggaaataaagtattgaatacacattcgtcaaataaacaaacatttttaaatttaataaatttctccaaattgtttaaatgttccacttcttgttggatttttcagattatcactttgttcaaatgatgtttaaaagatgtcttcaggccgggcacggtggctcaagcctgtaatcccagcactttgggaggccgagaagggcagatcatgaagtcagcagatcgagaccatcctggctaacacggtgaaaccccgtctctactaaaaatacaaaaaaattagcggggcctggtggcgggcgcctgtagtcccagctactcgggaggccaaggcaggagaatggcgtgaacccgggaggcggagcttgcagtgagccgagatcgcaccactgcactccagcctgggcgacagagcgagactccatctcaaaaaaaaaaaaaaaaaaagatgtcttcagtgtgaagcagagataactctgtttccccaaagaagtcaaattagattagttgctgtttattttttggggatgaggtatttgtctacaatattggccctatatgcacctatgaaagtgatgctctcttatctcttgatcatctgaaggagcaaggttggctttttctgaagacacatttttcccaccactgaggcatttctttcattgacagaattttccatttagcttagtggccttaacaaggcacgaccatggaaagatgtttgttacccagtccagactcctgaagtggaacctttgtaggatgggctagggaatctgcatctccaacacaatctttatgtatctttatatgagtttatctatttaggaacattgatgtagaggtagtctttatgcagttttagcaaactattttctctagacaaattttttagtgatctttcttataattttattttttatactggaaataattacattactgtagctatctgctttattggctctagtgtatatttgcaaaaagtgtgaatgctacaactggttctttactttttaatactttccattgtctttgtcctatgaaattgcaaacttgttaaacacactatagacattatatgcacaaacaaggagagtgatttagaaagcggtgtctggagtaacactggttctctcactgttgttattcaacttctaaatttggaattataataatgacacctgcttcaagaagttcttgtgggaaatgaatgaaataatgtatattgggcattaacacagtgcctggcatgaaacaaatgctatatatatttagcaattattgttatttttgttgttatattaagcaatcttataggtagacatgataggcgtacccatgtttgacaaatttataatctactttgctgcgtcaaggggagatctacatttcatatggacatttgtttctgatgacctggaaaagaaatgactcacagaaagccagattagggtagctgtttggaaagttcgtagaactgaatgttgtatttggctcccacagctcaaaaggtcctccacagtccgctgaaaaggaaagcaatgggaaatcatcagtaatacaatgtttatttcagagagataataccatatgccagcgaattttcaattacatttcttagaatacaaattttggcaagtaaattttagagtcatgttagggtaaatgctgcagtttaagtaaaggaaaaatacagttaagtagataagagctctaatgatcagtgatgttgagctttttttcatgtgattgttggccgcatgtatgtcaccttttgaaaagtgttcatgtcctttgcccacttttttgtggggttgtttattctttttcttataaatttaagttctttatagaagctggatattggatctttgtcagatgcataatttgcaaaaggtaccatctgacaccagtcagaatggctattagtaaaaagtcaaaaaataacagatattggacagtttgtgggaaaaaatgaacacttatagactgttggtgggaatgtaaattagttaaactatgtggaagacagtgtggtaatttctcaaagacctaaagacagaaatacaatttgacccagcaattccgctactcggtatatacccaaaggaatataaatcattctattataaagacacatgcacacgttttttcattgcagcgctattcaaaataggaaagacattgaatcaacctaaatgtccatcaatgatagactgactaaagaaaaggtggtacatatataccatagaatactatgcagtaacaaaaaataataagatcatgacatttgcagggacatggatggagctggagaccattaaccttagcaaactaacacaagaacagaaaatcaaattctgtatgttctcacttataagtgaaagctaaatgatgagagcacatggacacacagagggaaacaacacacactggggcctttcggagggtggagagtggtaggagggaggggaatcaggaaaaatcacttgtgagtactaggcttaatagctgggtgataaaataatctgtacaaccaacctccatgacacgagtttacctgtgtaacaaacctgcacttgttcccctgaacgtaaaagtaaaaaagaaaattggaaaaaaaaatagataagaacttctcaaaatttctttagcattcttatggcctttgtgaatcttcaagaaagcaagatagtgcacagcacttccctaaaattatttgtacaaaggaaatttttttgtcaaatatcttttataaataggtttcataaactaagatataaaatccctactgtagaaaatgtttacttaaaataaaacaaattcaatatttaccactctctaacaagaaaggctagtaaatcatttaattctgcaattcttgattttcctttttttttcattttatttatttattttttggtagtcttaaggggaagcttcactattctgcacatggatagtaaggaaagggagacaaaatgaaacttcatttgcttaataaatgcttaatcaatgccccgatctggtagccaacattgcgcagaagccaggttgagacgggtaatgattaaggcaaatttattaaaacaacagagcagaggtcttccagctcagagtctgacactttaagtaggtagattaactttataaaattcttaacatactttgttgtttcatttattagaaacaaattctaaagtaatgtaaaaaatcaactattttaagcattctaattgtatctaattcttgttaccattattatgttttaaaacaagaccaaaagaagaaaagtaatctcatttgaagaatgcagaaaactggaataaatatattcttttctattatgaaaggcatataatactgagattatttacccccaataaactagaaatcagattttgggagggataattaagtgtctctacatctatgacagtgttgatagccataccctcttccttaatctctctttcatatatgttctgccttatttatgtaagtcacttgaaattcatgtgcatcttcaaagtttatatgtaacacactgcttagatttgggtttcatgatgcatatgatgggacaggaaggcaattactctgactcagtgttgggatctttgccaacctgtcctgttctgtaaagagatagggcatggtcctgttcttcatgcctttcagggccaggtttgtctagacccagatgaacttatcaaaataataaaatgttttaccaaatcttgcaaagtgcttccatgcatgttatctcatatggggagagaacgcaatgtataagaggaggatttgttggagctggtggatgaaaattgtggctctgagttagttgtcttggagacaactagatatatattaaggattttttggattgttgtaaaattagacataatttaagaaatgttcctttgcattacctgccatacttagtactggttttcaaggcaatcttgtggattgggtaattactattattacttcagttttacatggaaaatctgagaattacagatattcacttgctttttaatgccatacacagccacctagtgtcaaagtcaagacctcatcatggttaatctcgagctcatcccacagtaatttactgtctcctattgggttgattaaactttggataatttccaccatctggttcacactgccataggcagggtttaaattgagtctctataattggcacttgatacgtacataacaaaaaaaggagggcagtggatgaaagcactgacaagtaaggtcaaggatggctaaacctagaaggaagaagagagtgtacatggggtgccgaggaaggcatgtgaaccaaagaaggaacaacaatggagaacaagggcaagttctcaacaggaaatcatgactaatttacaaagatttcagaagaagggtctaccacaatcctataacctctacatacacatggcacatttaatttcaataattctacattgctatgaaatacttcttttaaaccttaatgagaccagtgaaggagggaatgtctaactaacttcagggacaaatattacactcagatataagactgggaaaaattaacttcctatttcacaaatttagcagtggccaatactgggtttttaaaaaaatctttttgtgtttttgttttttaccattattcttattttatcctcaagtaacaggaaaaatgtaaaaccttatattcctgatagagtaaatagctgagatttggaaaatgcattggattttgacataattgaacacttagtgtgctatacttaaagatgagtatgtaggatgttaatgagcacataacaagaactccaacgttgtcaagtgtaatagttaagcctgtcaaggcaggcagtttacttaggatttcgccactaaacacaagtcttggaaaatgcatccctttaaaatacttaagtactttttgaaatgcatttaaatcataattatcaaataactgaccaataagacatctctgatccctggcctgataaaatagatcagttactctctgcatataaatgactgtaaagaattggtaaaaacactttaagtcattctaaatatgacacaatttattttaatggtgatgttgttctagcagagatgtggcatgtgcttctaatagagaaacaaaagattcatgaaatgtaattccaaatatcacagtcatgctgtgccattaggtaaaacatcctcagccagggaatgagagtaaaatagcctgtctggtatagggaattatattcatttatagtgttaaattcctttttttttttttttctgggagctgttctctcaaacacttgtgttctgattaatttcttactatgccaatagggatttccactgcatatactatgtaaataacatgcagtatttggcaaagtggttgccaaggatagatattttccttgatgcatgtcattttttactccatgcttaagcttctgatgtccgtgaaatgtgtgttaatgcagaggtgtttactgaggggtggaaaagagaagagcctagctttcatctacaataagagggttttaattaaagatatttatggcaaaacaagaaatgagaatatgggaaaaatagatttttgattgatactttatgtgatagaattaatagatgtagcttgagaaataatacctcctattgatcgatgtttgaatatataaaaagtggctaattttcaaaattggctattgtttttcatcattattgtaatagatacacaaatcttttggtatcacaaatagcattttaaaagtttaggttgtaatttaaagtaaaatgttccataaaattttgtgttcatttgatcaaaatttatgttttcattaacaagttatagtgatcattcctgatataaatatttttattaaatgtgtaacaataaagttcagatttttattctctgtactctaaatttggttatcaataaaaatccagacaatgagagctcaaaaacgtaggctattagtttgctttgttttgtcttgttttgagattgagtcttactctgttgcccagactggagtgctgtggctattcacaagcatgatcgtagtgcacccgagccttgaactcctggcttcaaagcatcatcctgcctcaggcttccgagtagcttggacaacaggtatgtgccactgtgcctggctcaggctattagttttagaggtaaaataattaaatcaaaatagaacaacccaaaacacactgatcaactaagcaagcagttctgctgaatatggccatcaatttcaagagaggtagagaggtagacaggtactgattgattcatatctacatgaagaactaaagttagattatttagctctaagtattaggtcacatctacaaaactttccaaattaacttttttttctttcttttccccagagagacagggtttcgccatgttggcgaggctggtcttgaattattggcctcaagtgacctgcccccctcagcctcccaaagtgctgggattacaggtgtgaggtactgcacccggccatgccaaattacctttaatttacatttggaagtagaaaatggctttaaaaatggtgaaataaagaaaaactgtggaaataaagagtgaatattgaaatatttaatactatagctaggtgttttgtttttgtttttctttttaattagttttaaaagccccagaaataagccaggggcctgaaatgtggattttgttttgtatacacctatttctattcagtaggtatcttgtcatgaatcatcaaaattgttttaaattggcttgatcatcacgtaatggaatgtttattctcttaaagtgtactcagcgcaatccccacatttaaattcatttgtaccaacatcacagagcaacaattgtagaatcaatgcagcagaaagttattaaagtcatgaaatggaataatctctgtggttatgaaagccgaacttacatttcctcagactaggcacaatgtgggttcccaggaaagagggaggaaactgagcgttattactcagtcactgatctgggactgttttcttctttaagtgctctatacgaacccaaagaaaggctattagccagtcagccatggtttccttttattactgcttaaacaagtcattgatctggaaccaaaaaagctctactcaaataagaatttcactgaaccaattgcaaatggcattagaatgaaatttttcagaatacatttgatggtaattaatgttttctgctgtgaaaaatattgtcttgaagtgaaccatttggaaactggaacaaatagactccgggcagattctaaagtttatattttcaaatcagatgggttattctttcattataatttccctattgttaaaatagacagggacaccaagcttgacataaaggtgctatctttttctctttctgattggaatataaatatgaagactataagggtcatatagatacatttttaacttaagaaatcatatttaaaattttgtttctatgtatgatatgatgtaaaaaagttacctcaaattttctattttaggtaatggtgagatggtgctacattttaaatatcaggtctaagaaactatattacttcctcctagaaaatttttcttctttattatttatgaataaataggggaacaaactagcaaaaagaattatcaagaaaatctatcatgttaaatgattgaaatatcaaaatagcaaaatgttgctgatatttggtatctgtaggaataattactatttatcaagcaagccatgattttaatgatgctgaatgttgttcttgcaaaaaaactcttccatataataaataggtagggtgtgggtcacctacacaaaatgaagtgagacaattatttttaaacaatgccccaaatccaaaattactgcatttatgtgggtattttttcctacacccatccctaccatcatttccaaactttagttttggtaccaaaattttgtttaacaaaagtttcatgtcaccaaaataagagtatatccaaaagagagagagacagagacagacagagagagagataaagagagagaaagagagagagaggcttagtctgtctctaatagtatttactgatcaccaattattgtgatgttaggaatcagtcatacactggtaaagcaaaggtaaatttgacctagagtttgctgtgaaggaactcacttcttgtcacaattttatgaccaatattattccatgagaatgtatggtactttcctgcttttgcatccattttatgagtatcattccgtcttttatctgcacgcttccttaaagccttcttctgctcacattttttttttctccaaagtcctctatcacttacttctctcatgtattacttttaggggcatataattatacattgcttcaaatatttatttatatattttttcatgtagtaatggttattgctacatcttacatttcatctgcagtgtttagcagatggcagatatttataaaatttgaatgaatgattaaatattgagtaacatatatatctcatataagcatctaaacatgttaatacacaagatagtaaaagcaaaccgatcttttggaggaatgtaagtgctcattcaatatggtggcatgggatcaatatgacaatataactactgtcttcaacctaatggtagctcatttgttacatgttcttaaatacccataattaacctttagatccttttcattgttaaagccactcatctgaaaagtctgctttttttccttgaagattggaagcagaaaaagatatagttttggaagtaaaccaaatttggataggctctccaaactgatttgctgatataatttggtaaaagtattaagtgtgcttcaaagaaaatgagaaatggaaaaagtactgcgtttgtgggatcagatccatgcagaacaaaacacacatgaggtttaacccaagcaaagccgtagagctaagtcagcttccaaccaccacaatccaaagaaaaaagcattgttttttttgcataaaaacaagtgtagtgaaaaaatccctatagaaagtcagtggatgtttgtaattatttattatcataggcatttttctttttctttgtttatctgtcaaacccctaatctgaaagtagtatgaagtgattgtcttctttgacatggataatttgaatggtaatgggttttgttctgaaatgtcacgcttccaatttgacttaagagcacaagtagacacaggctcgatttggttcttttgacttaaaagatcttataggacattgtgaaccttggtcacttctcaggagtaacacatgagtggatccatgaaagaaacatatgccaaagccttacaaaggtactgtgatagttaatattgaatgccagcttgattggattgaaggatgcaaagtattgttcctgggtgtgtctatgagggtgttgccaaagaagattaacatttgagtcaggggactgggaaaggccgacccactctcagtctgggtaggcacaatataatcagctgccagcacagctagaataaaagcaggcagaagaacatggaaggattagactggctgaattttctggccttcatctttcccccatgctggatgcttcctgccctcaaacatcagactccaagttcttcagctttcagactcttggacctacacctggttgccagaggctctcaggcctttggccacagactgaaggctgcacaatcagctttcctacttttgaggtttggggacttggactggcttttttgctctaagcttgcagatggcctattatgaaatttcaccttgtgatcatgtgagtcaatactccttaaaaactctgtttcatatacacatctatcctatgagttctgtccctctagagaacgctgactaataccgccactatttaggacaaaaatattttaggtgatctatgtctgtatgttcaaagtccaggcttgattagtcattgttattaaattattttaaaaatagacacagtaggtttcagatttaactaaactcttaaaattactccttaagaagcccacaaaaacctcaaggcaccctccccaaagactacagaccatgccacgtggccagtacaacatttgtttgtattccagtgaaaacaaaatggaaaccagctcctttattactttcaaatataagaaagatactaaaatgatcattaatatgctcaataacgaagagtggttttcattgtggatttatgtgtaacatgtaatattttgctagcctccatttggtttatattttgaagtctttgattttcaggaaaaataaataacagtaggttgagataataagccaaaggaagatctacctgaaaataattattgttttttgttttgttttgattttctagagacagagtcttactctgttgcccaggctggagtgcagtgacatgattacagctcacaacagcctcaatctctcaggctcaagagtccctcctgcctcagcctctccggtagctgggactacaggtatgcaccactgtgcccagctaatttgtgtttgtttgttttgttttgtagagacagagtctcgctgtaatcctcaggctggtctcaaactcctggcttcaagcaatcctcctgcttcagcctcccgaagtgctggaattatagctgtgagcctccacacctgacgttaatgatttaataagacaaaatacacatgaaggttacttactaggaagttctggtggaggagttggcaccaaagttggttctggataaagactcccattgcaaatcccatatgttaggctaatgtcatccaacgcaatatcactcaggatcttgtttttaaaagcattaaaagcaacctgcaattcagagaggcatatgaaacgatttgattccattctaatcttctctgacttgattcttcttgtgagcccaagagattcaatattgtctagagattcaatattgtcaccttgaactatatggtgaccgttactacatagtgaaatcttgacagatcatgctttttaaattcttctgctgaacccaacccccttattatgtgttcacactggctaaatttccaatgatgtcttccttctgaattagtcaatattgttacagtttctatatctctgtctgtgtctctcttatgatattgtcatattccattgtactctgtcatgcatatatatcatctggcaggagaaagcaattttctcccaaatttcttctttcagcaatattaaacattcaggtagttttcttccttcttagagcatacaaagcctgaagagaaaacacactgggggtgaaggggacgagagagagtatgagtgtaaaacgatcattcagggccagctgttactggtcacagttcacccagggtgttgatgtgggatactgtgcaagggtggtgcccggaggacacagaacgagatttggaagaaaggtccagtggccagaggtaacatattaggttctcaggaacagtgggtattttagctgtactttcctggatcctgtgctatgtagaagaggaaagacataaattgaatgtctgctatatgctatttgctatgctaggcacatggtatacattgatcttatttaattttcaacactcattcattcactcatttgtttattcattccacctacttcatgccagacattattccagtaggtattattttcttccttacacatatgacctaattaaatttcaaggagactatggtgacttgctcatgatttcacaacaaaatggcaaagccaaagtgcacgtatctgtagaacttgactctctcgcaccacctcatgagctgtgagaaactggatccaattatattactttagaaaagacgctcaatgagtatagccacatctggccactgcaatactgacttccccttctgctgtctcttttctccctggcctttccattttcccttacccttctctgaattatcagaaaacaaaattggagaggaaacgtcccataaaaggatcaaagaagaagaaagaaggaaaaaggaagagaaggaaagaaagaatgatgggaggaaaacggttgagagtcattaattattgccttacaccaagtcacggggaaaatctgaagcctttgatgatggcagtgtctgtccaaatatacatcttctgaaagtgatactcttgtgtttgaaattacccatttaaaacattattaatttggtcaaactaatagcctctattatgccatattttaattgcaaagaccctcaggaagagaacacattaaagtgttatttgaaaaattaattcaccttaatgtgaaataaatgatcagagacttcccaatgctacagctcatataatttgtttctaaaggaaatacatggagattaaatcagagtggggcagggtgggtggatgcctatgggcataggcatagaaaagggcagggttgacctaggtggtatttgtgaaaagctgaaaattgtaggtaggcagagggcttagagataaatggttggcctatgctagaaagttgctgaaggaagctgaaatattctaaaagacttcgatgtattttatggaccattataagctgtattttcattagtacattgttcctcaatgatggtttttaataggctattgaataaataaaaataaaatactccaaggtaaaatgtgaggtagattgggcaagtagagaaagtgacttgattatcttcagaaaatacattaattttttcactgtatcattctaaatataattgttccaccacaaaaaggatacaaatataaataataaagtattttgcaaaccttaaatttaactgtttcatttagggttacttgtccataattccaattgtctccataatttccttccttttggaaaactgtcttctccatattttggtcattgctgatattaatgcttaatttatggacattttcaccatacatatgatacctagtttggaaagaagcaaaaatgtttggattcctacaacattagaataagtccttttcagagcttttctacattttttactttctttgaaataatctttttttccttctgggttttggagttgctggggatggggagaggtgtctatcaatgttttattgcttatcagttgggaaaagtaatagtatatgcattaaaactttagccaacatcttagtgaaatatgagcctggtggcctgagcaaggcaatgttacccattaaaaaagacagcgtttaaacaggtgtctacaacataccagaaactaaggcaagctggctccaaagtggggtccaaagggaggcttaaaagccccactcgttcttgtctccctcctggtccagttggggtagaaatgtaaaatcctgtaaaaatatcaaaaaaaatttatttcacttaaatattgcattttcattgtgtgacaagtagactttgtaagcaggaaagaaaaactttaagaagaaaggttaaggaaatatattttaatatagtggacaggacactagactcgagctcagaaagcagtatttttgccataacagattgttattgacaaaaatagcttaacactgggcctcccactttattaaacaagagtcttgaagtggagtaccaccaaggatatataaaattctgacttattatgagtcactaaattatccagtccaattcctgacttaattctagtttactagatattttgattaattcacatgaggatatctagagatgctggtggactaactcagaatatacacatatatttaaatacaaatttgaaggcaaatttaagagtttctaagattttcagttttatatttcactgaacacttcatatctctaaataagaacctgccttattttaaaacagtcttatctttctttattcctatgaacgataagtaatcagatcactgagaagcagaaagcatgctaatccgtataaaactttcaaaatagcacaagccactgcataaagtgcttgctggtctgaaattcattattccaaccaatgatttcagtcatttgaagtttgtgaagggttgttgggataacattttgaacattttcttaggggaatttattttattcttagtttcctgctcacatattatgacaggaagcgagaatcatgtaactaaatattatataaagcaaatgtgatgttggattaatctaatttgattggaatgcaattttttatgagatgatgaaatttagtgtttacttgaaatcaagcatcttctctcttgtgctttgcaacagaaaaatataggcaatgttgcatataaactttaaactcattcatttatgagatgcaaagtaagaacaaggcataaagaaaagaagctagtagaactgcctataggtatatcaatgcatatttagaccagtgaggcaaaaattattcagaataaatgagtgttttatcaaggtgaaattatggtcaagtggcttaataaatgtaatatgtacacattcatttgctttgtatgacaaactgttaataatgtgtttaaaattttatattattaacacattactcctattttatataatgctgtaatatttcatgagtacatatcttagctattttgttagtgttctaattatatgactgcatggagaagagtggcctagatacagaagagaggtcccagaatctactctttaaatgcacaactccaaatcgcttttgaatttaccttacttttgattacttagaacataactggggaagaaataattaaaataccactgaatggctgggagcggtggctcactcctgtaatcccagcactttgggaggccgaggcgggcggatcacgaggtcaggagatccagaccatcctggctaacacggcgaaaccccgtctctacaaaaaatacaaaaaattagctgggcgtggtggcgggcgcctgtagtcccagctactcgggacactgaggcaggagaatgacgtgaacccgggaggtggagcttgcagtgagccgaggtcgtgccactgcactccagcctaggcgacagagtgagactccgtctcaaaaaaaaaaaaaaaaaaaaaatccactgaatatcatgaataaatactcaaatggttagcctattcagaaaaatttctaattagctacaattatataaacacacatcatgctcctatttatgtttggccatgttcacagtcaatagttataattaatttgaaatagtttgaatctgtttttcacttagtaagcagtgatatatttggagttttcagtatgatcaaaatatgatgctatgatttcttttgtcagtgatcaagtaaaacataattaattatgtagactatagtaccttataaatcttgcctagagtaaatatcatatagaattgcatattattgaatatagtaaaataatatataacattaaattgctatttttgtgatatcagctacattctttagttaacaaattagaagatgaataaaagccttcataaaatgctaaagtttaagagtagagatttgcagtttacataaaactgtacttagtctaaccactaattgtccttaaatttcatctataacattttgccctaagggatcacttgatctctggttaacagatgccagatgcagaagaaattattctattccaaggcatcccattccgtttcaacatgattagaaaattattttcttttttaaaaaaataagcttatacgcacctattataactaattttgccttgtgggactatttacaatataacatatttgttagctctacagaagtttaaaggccactattacatctctcctaagtcttctcaagattatccatcacttttttttccttaaataattttattaaggcagtttcagtttgcttctttaatttgagaagccgtcaattagctgtacattcagttgcttccacttaaagtatggaaactcacattcacacaacatgtctgttgcgctatctcaccagggagcagagtagaaacatcccaacgcatggaactattactgaagacagaccatcattgtcactatttccaagtgcatctcacttctagctctctgagtcttcttgggaatcatctcttacaccattgctcaataatactttcttatgcacaatcaaattagccccttattcaagatcttttattatctctttatttcttattaaaccaaatacaaatacagtctgatatttgaggcccctgtgttatgacctcaatgtcattttccggctattgcacctatacttcatctatttccatagagcacttctgcaaaattagataattttaatatttccaaacacctagaaattttttgacactttgtgtcttcttttttctcttttacctccttccacttccccttccaattgtaccttgttaaaatcgtatcaattttttgaggtcatttaaatcaaactgtcatctccttcagaaagcctcccaattaaaagtaaccactttttcttttgaattctcggtggcactttgtacttctctgatgtcattcggcatattctgtcatgtatatattttttttcttgagatgatgtttcactccatcattcaggctggagtgcggtagccaatcttggttcattgcaacctctgcctccggtggttcaagtgaatctcctgcctcagcctccagagtagctgggactacaggctcacgccaccatggctggctaatttttgtatttttagtagagatggagtttcgccatgttagccaggctgctttcaaactcctgatctcaggtgatccgcctgccttggatgtgttgggattacaggcatcagccactgcacctggcctgttgtatattttatttatgtttatatgtgactttttaaacttgctagaacttttggaaacaagaaagacactttgttcattttttttctgtcttgatatgaattagctgtctgttgtttaacatatttttgttacagatttgctttgcttttaaatttattaaatttctacataaaaggaacaactgaagagattttttcataaccacatgggaatttatatggtcaaaaataatttcttctaaaaccctttgacttccttgaaatgttttctagagctcttagaatcaatctcagtcaacttaaaacccaggatattggccagccatagtggctcccatctgtaatcccagcaatttgggagtccaaggcaggaagatctcttaatttaaaaaaagaggccaccttatactaataataatgatagctgtggctgtttttacaaaaaagagaagggggagtttgacaacataatgaggccccatctctataaaaaatttaaaaaaattgctgggtgtggtagaatgcacctgtgatcccagctactcaggaggctgaggtgggagtatctcttgagcccaggagtttgaggctgcagtgagttatgattatgccactgtactccagtctgggagacagagtgatcctgtctctaaacaaataaataagccccagaaaattgaatacactttgtttacttaagcttgtaatgatctcttttttgaactattaggtttttcttaaaactcctttccatcactttttcctgcttatctcttcatgaattgaacctagtctctctccacccaacatcctaattaaaaagcaaaacttctgagcatgtgctgatctgatatagagatagcagaaactggagagatagtagaacttcctgagatcctagaaatccctctcaagaaggaaataggctgatgcaaattgtttcatgatttgtaaatacatatgtaaaattagctgaacctagtagataaatattattaaaagcttaaactgatgcatggcctaaattcagtcagattttatcaattttagaaagtaatattattttctaaaattcaacatcacaggaaagataggaaaataaaaatgttacttttaaaacattaaagttacacttattttagaaaaagtttatatgctaagttaaatgaagatatctgaaagaactaatatgattttgaaaattgagcagagtgactattttcctccccaacatatgacttagaacagtaccacagccaatgtatgtttctcgaatacttttgcagtatgaaaagaaagtagttataatacctaacatttatatagcacttcctatgtgtcagccatttttcagagtttttttctaaacatagcaatcaatttaatgtttattacatgcctttaatggcaggtcctattgtcctcaacctcactttccagataagggaattgggacagaaatagaagataggaaacttgcctaaatggcagggctaagatttaaacctggctaagactccagggtctgtatttcaatggtttttactactaaactatactacctcccacagtattacaaacaattgcaatttcactggtaaaggaaacgaaagaaacattttatttgagctatgtagtcctctgcgatccctatatttctgaagtttccacatattatgaacctcatttgtcctgagccttctaaatgaatgggccacttctgagcacctcaagatgctgtcctgcctcaacaccaccttcttgaccaattccttttgcttctaagaggtacagagaaaccctgactgctgacaatacagagatttagaagccattgcttcaccagaagagagttcttcagaaggactagaaaaattaagaggcttaggtgttcttacctaaagcagtattaattcaaagtttatctgtttcatttagtcttttctgtcacttaaggtaaaggcaaagaacaaaacaacaatacaaacaacaaacctgcctggataagaggaacatccagaaatatttaattctctttcatttcagagataggatgttctgacacataaaaaagcaggctagaagaaaaacgccctttggagaggaatgactggttgattatgaaatcacaggtatgggagttggagaggacctattaaatcctatcatctgtcctcattatatgacttgtctaattttaaaaaactcctgctactacgctttctcctgagacttcatttcagacccgactatttaaaacctccacttgacattcaacccgtttcactttggtcagtttcatcttatttccttagttatttaatctgttggcaagccgaaaacattttcccctttaatgtacttatgctcttcaaatatcagtggagttactttatctcttattaggatgacataagagcagaaaaatgataatttgaacatcagagatttcaaccacataaaaggtatctgtcatagtcaatagatataaatgctttttgcactttcctctaactactcttgtccaagtgtggtagaaacttttttttaattacagtaaagagaaaaaaaaagatcagattatttgactgttttaggccagaccccttcagagagttggggtgattatcatgtaggggttagttttcagctgtgtaattagtgatttttccatggagaatcaggcactgggaaataacttattcaaagaagattaattatgtatgagagtattcatgtcatcattttcaacactaaactttttttgtcttacggggttggcaatttacataaagaacattttttatgtgaaggcccacact
